(19) United States
(12) Patent Application Publication
(10) Pub. No.: US 2003/0138787 A1
(43) Pub. Date: Jul. 24, 2003

(54) Functional genetic tests of DNA mismatch repair

(76) Inventors: Grant A. Bitter, Agoura, CA (US); Aaron R. Ellison, Thousand Oaks, CA (US)

Correspondence Address: Richard J. Mazza, c/o BitTech, Inc., P.O. Box 1499, Agoura Hills, CA, 91376-1499, US

(21) Appl. No.: 10/109,791

(22) Filed: Mar. 29, 2002

Related U.S. Application Data
(60) Provisional application No. 60/281,636, filed on Apr. 5, 2001.

(51) Int. Cl. C12Q 1/68; C12N 1/18; C12N 15/74

(52) U.S. Cl. 435/6; 435/483; 435/254.2

(57) ABSTRACT

An invention is described which provides a diagnostic approach for diseases, such as HNPCC, that are associated with defects in MMR and provides a method for determining whether any specific genetic sequence of a gene associated with MMR that differs from a consensus sequence is a mutation (i.e., encodes a non-functional protein), a silent polymorphism (i.e., encodes a protein with normal protein function) or an efficiency polymorphism (i.e., encodes a protein with reduced efficiency in MMR). The invention allows the generation of databases of the functional significance of specific amino acid replacements on MMR protein function in vivo, which in turn will allow accurate and unambiguous interpretation of genetic tests of MMR.

### ACKNOWLEDGEMENT

[0001] Work taking place in the laboratory when this invention occurred was supported in part by research grants from the National Institutes of Health (R43CA81965, R44CA81965). The U.S. Government may have rights in this invention as a result of this support.

### BACKGROUND OF THE INVENTION

[0002] 1. Technical Field

[0003] Hereditary nonpolyposis colorectal cancer (HNPCC) is an autosomal dominant inherited disease caused by defects in the process of DNA mismatch repair, and mutations in the hMLH1 or hMSH2 genes are responsible for the majority of HNPCC. In addition to clear loss-of-function mutations conferred by nonsense or frameshift alterations in the coding sequence or by splice variants, genetic screening has revealed a large number of missense codons with less obvious functional consequences. The ability to discriminate between a loss-of-function mutation and a silent polymorphism is important for genetic testing for inherited diseases like HNPCC where there exists opportunity for early diagnosis and preventive intervention. The present invention provides quantitative in vivo DNA mismatch repair (MMR) assays in the yeast Saccharomyces cerevisiae to determine the functional significance of amino acid replacements observed in the human population.

[0004] 2. Background

[0005] Colorectal cancer (CRC) is one of the most common cancers, affecting 3-5% of the population in the western world by age 70. Each year approximately 130,000 individuals are diagnosed with CRC and 57,000 individuals die from CRC. Hereditary nonpolyposis colorectal cancer (HNPCC) accounts for approximately 10% of CRC and manifests with a high rate of mortality in the absence of early detection and treatment (reviewed in: (Kinzler & Vogelstein, 1996; Papadopoulos & Lindblom, 1997; Peltomaki & Chapelle, 1997)). Diagnosis of HNPCC in a family is based on kindred analysis using the Amsterdam Criteria (Vasen et al., 1991), which require: i) three or more family members to have had histologically verified CRC, with one being a first-degree relative of the other two, ii) CRC in at least two generations, and iii) at least one individual diagnosed with CRC before age 50. At the molecular level, HNPCC is associated with defects in the cellular process of DNA mismatch repair.

[0006] The process of DNA mismatch repair (MMR) corrects non-native DNA structures that form primarily during DNA replication. These aberrant structures include incorrectly paired bases resulting from misincorporation by DNA polymerases, as well as insertion/deletion loops in DNA which form, for example, as a result of microsatellite instability. The amino acid sequences of MMR protein functional domains are conserved from E coli to humans, and the eukaryotic MMR proteins are named based on their homology to E. coli MutS and MutL. Mechanistic studies of MMR in yeast and human cells have elucidated similar processes (reviewed in (Fishel & Wilson, 1997; Jiricny & Nystrom-Lahti, 2000; Kolodner & Marisischky, 1999)). MutSα is a heterodimer of MSH2 and MSH6 while MutSβ is a heterodimer of MSH2 and MSH3. MutSα recognizes base:base mismatches, as well as single base insertion/deletion mispairs. MutSβ also recognizes single base insertion/deletion mispairs but is primarily responsible for recognition of larger insertion/deletion mispairs. Heterodimers of the MutL homologues bind to the MutSα or MutSβ DNA mismatch complex to effect repair. The yeast MLH1-PMS 1 heterodimer (MLH1-PMS2 in humans) binds both MutSα and MutSβ while the yeast MLH1-MLH3 complex (MLH1-PMS1 in humans) binds MutSβ (reviewed in (Kolodner & Marisischky, 1999)).

[0007] HNPCC has been shown to be caused by mutations in the hMLH1, hMSH2, hPMS1, hPMS2 or hMSH6 genes. To date, more than 240 mutations have been described, and the vast majority occur in either hMLH1 (60%) or hMSH2 (35%). It is probable that the majority of HNPCC is associated with mutations in either hMLH1 or hMSH2 since inactivation of either of these genes results in impaired replication of a broad spectrum of mismatches (single base:base mismatches and both small and large insertion/deletion loops). The most comprehensive database of sequence alterations observed in genes encoding human MMR proteins and implicated in HNPCC is the International Collaborative Group (ICG) on HNPCC (http://www.nfdht.nl). Additional sequence variants which have been observed also appear in the Human Gene Mutation Database (http://archive.uwcm.ac.uk/uwcm/mg/hgmdo.html) and the Swiss Protein Database (http://www.expasy.ch/sprot/sprot-top.html) as well as several single nucleotide polymorphism (SNP) databases (http://manuel.nih.gov/egsnp/genelist-all.cfm, http://www.genome.utah.edu/genesnps, http://www.ncbi.nlm.nkh.gov/SNP). In addition to mutations in hMLH1 and hMSH2, it has been reported that defects in MMR can be caused by gene silencing due to hypermethylation (Herman et al., 1998). Genetic testing of individuals in HNPCC kindreds should decrease cancer-associated morbidity and mortality in this group. Removal of pre-cancer polyps observed during colonoscopy is highly effective in preventing progression of nonpolyposis colorectal cancer. By identification of those individuals with MMR defects in HNPCC kindreds, routine colonoscopies can be performed with, and restricted to, those individuals who will derive benefits from the procedure.

[0008] In the genetic analyses of HNPCC kindreds, more than 25% of the gene alterations observed are minor variants such as amino acid replacements or small in-frame deletions. These sequence variants, furthermore, are scattered throughout the gene coding region. If an observed amino acid replacement can be shown to segregate with disease in the affected family, it suggests, but does not prove, that the amino acid replacement is an inactivating mutation. Frequently, however, small family size or unavailability of clinical samples has precluded attempts to correlate the amino acid replacement with pathogenic effect. As genetic analyses of HNPCC kindreds has continued, an increasing number of minor variants have been documented. To date, missense codons resulting in 86 different amino acid replacements have been described in hMLH1 while 66 have been reported in hMSH2. It is now generally acknowledged (Jiricny & Nystrom-Lahti, 2000; Kolodner, 2000; Peltomaki et al., 1997) that accurate and effective genetic testing for FINPCC will require determination of the functional significance of these minor variants, since the utility of genetic tests is severely compromised if there is any ambiguity in the results.

### SUMMARY OF THE INVENTION

[0009] The investigations leading to the present invention demonstrate the usefulness of measuring the function of MMR proteins in vivo. Specifically, a quantitative in vivo assay of DNA mismatch repair has been developed in the lower eukaryote Saccharomyces cerevisiae. This analysis system has been shown to be capable of distinguishing silent polymorphisms from “mutations” (i.e., functionally inactivating variants). This yeast system has now been adapted to provide information that allows the analysis of the function of human MMR protein variants and the elucidation of the significance of the codon changes observed in human genes. The information generated with this technology will be useful for unambiguous genetic testing for MMR defects. The invention reported here also demonstrates the existence of a novel class of amino acid replacements that result in proteins that are functional in MMR, but at a reduced efficiency relative to the native protein. This novel class of variant MMR proteins is referred to as “efficiency polymorphisms”. Some of these amino acid replacements have been observed in sporadic cancers and suggest that individuals in the general human population may have different efficiencies of DNA mismatch repair due to common polymorphisms. The efficiency polymorphisms discovered in this invention, as well as those that can be identified in the future using this invention, are predictive of individual differences in susceptibility to develop cancer. Individuals in the general population may thus be screened for cancer susceptibility as a result of the current invention.

[0010] In the described study delineated further herein, missense codons previously observed in human genes were introduced at the homologous residue in the yeast MLH1 (SEQ ID NO: 1) or MSH2 (SEQ ID NO: 2) genes. Genes which encode functional hybrid human-yeast MLH1 proteins were also constructed, and used to evaluate missense codons at positions which are not conserved between yeast and humans. Three classes of missense codons were thus found: (1) complete loss-of-function, i.e. mutations; (2) variants indistinguishable from wild-type protein, i.e. silent polymorphisms; and (3) functional variants which support MMR at reduced efficiency i.e. efficiency polymorphisms. There is a good correlation between the functional results in yeast and available human clinical data regarding penetrance of the missense codon. The discovery of efficiency polymorphisms, some of which did not appear to be associated with HNPCC, raises the possibility that differences in the efficiency of DNA mismatch repair exist between individuals in the human population due to common polymorphisms, and that such polymorphisms predispose to early onset cancer development.

[0011] In brief, the present invention provides a diagnostic approach for diseases, such as HNPCC, that are associated with defects in MMR and provides a method for determining whether any specific genetic sequence of a gene associated with MMR that differs from a consensus sequence is a mutation (i.e., non-functional protein), a silent polymorphism (i.e., normal protein function) or an efficiency polymorphism (i.e., functional protein with reduced efficiency in MMR). The invention enables the generation of databases of the functional significance of specific amino acid replacements on MMR protein function in vivo. Such databases will allow accurate and unambiguous interpretation of genetic tests of MMR.

[0012] One aspect of the invention comprises a method for distinguishing efficiency polymorphisms from inactivating mutations and silent polymorphisms in a human gene encoding a protein involved in DNA mismatch repair, comprising:

[0013] expressing a test genetic sequence in a null yeast host in which the native yeast DNA mismatch repair gene which is the orthologue of said human gene has been deleted or modified to inactivate its function in DNA mismatch repair, and

[0014] comparing the mutation rate of a reporter gene in the null yeast host of the previous step with the mutation rate of the same reporter gene in (1) the null yeast host which has not been transformed to express said test genetic sequence and (2) the null yeast host which has been transformed to express the yeast orthologue of said human gene, or a hybrid human-yeast orthologue of said human gene, in order to determine if the test genetic sequence is an efficiency polymorphism.

[0015] Another aspect of the invention comprises a method for identifying defects in genes involved in DNA mismatch repair, comprising:

[0016] producing by random mutagenesis or in vitro mutagenic DNA synthesis a pool of mutagenized DNA molecules corresponding to said gene,

[0017] expressing said pool of DNA molecules in yeast host cells,

[0018] growing the yeast host cells, and

[0019] screening for yeast clones which exhibit a deficiency in DNA mismatch repair.

[0020] In these methods, the test genetic sequence can be a yeast orthologue variant of the human gene sequence or a human-yeast hybrid sequence of said variant. Illustratively, the human gene involved in DNA mismatch repair can be selected from the group consisting of the hMSH2 (SEQ ID NO: 3), hMSH3 (SEQ ID NO: 4), hMSH4 (SEQ ID NO: 5), hMSH6 (SEQ ID NO: 6), hMLH1 (SEQ ID NO: 7), hMLH3 (SEQ ID NO: 8), hPMS1 (SEQ ID NO: 9) and hPMS2 (SEQ ID NO: 10) genes, and especially, the hMLH1 and hMSH2 genes.

[0021] Still another facet of the invention comprises a method for determining whether a genetic sequence in an individual is associated with a defect in DNA mismatch repair, comprising comparing said genetic sequence with a genetic information database that has been compiled by use of either of the foregoing methods.

[0022] Any of these methods can be used in a diagnostic test setting to evaluate predisposition to the onset of cancer in a human subject.

[0023] An additional feature of this invention includes DNA molecules encoding a yeast proteins involved in DNA mismatch repair, in which a portion of the coding sequence has been replaced with the homologous coding sequence of the human orthologue to produce a hybrid human-yeast gene, such that the protein expression product of the hybrid gene retains function in DNA mismatch repair in vivo.

[0024] Still another feature of this invention encompasses efficiency polymorphisms, loss-of-function mutations and silent polymorphisms which are variants of DNA mismatch repair genes identified by use of any of the above mentioned methods, including but not limited to variants of the hMSH2, hMSH3, hMSH4, hMSH6, hMLH1, hMLH3, hPMS1 and hPMS2 genes.

### BRIEF DESCRIPTION OF THE FIGURES

[0025] FIG. 1. This figure shows the alignment of MLH1polypeptides. Amino acid sequences from human (hs, H. sapien; SEQ ID NO: 11), mouse (m, M. musculus, SEQ ID NO: 12), rat (m, R. norvegicus; SEQ ID NO: 13), fruit fly (dm, D. melanogaster; SEQ ID NO: 14), yeast (sc, S. cerevisiae; SEQ ID NO: 15 and sp, S. pombe; SEQ ID NO: 16), plant (at, A. thaliana, SEQ ID NO: 17), flatworm (ce, C. elegans, SEQ ID NO: 18), and bacteria (sa, S. aureus, SEQ ID NO: 19 and ec, E. coli; SEQ ID NO: 20) were aligned using BLAST algorithms (Altschul et al., 1997). Shaded amino acid residues are identical to those in the human protein. The human hMLH1 missense mutations examined in this study are noted above the appropriate amino acid residue in the human sequence.

[0026] FIG. 2. This figure shows the mutation frequencies conferred by missense codons in the yeast MLH1 gene (SEQ ID NO: 1). Strain YBT24 containing pSH91 was transformed with pMLH1 (Complemented) or the indicated mutant form of pMLH1. Mutator refers to YBT24 containing pSH91 but without a pMLH1 plasmid, while WT refers to strain YBT5-1 containing pSH91 but without a pMLH1 plasmid. Mutation frequencies were determined as described in Example 4. The mutant frequencies are presented as the mean±standard deviation of at least 4 replicate cultures of a single yeast clone that expresses the indicated MLH1 gene alteration. In this and subsequent figures, * * denotes a mutation frequency which is not significantly different from the mutator strain, while * denotes a mutation frequency which is intermediate between the mutator strain and complemented strain. Mean mutation frequencies are: WT, 1.1×10⁻⁵; Mutator, 1.8×10⁻³; Complemented, 2.8×⁻⁵; A41 S (SEQ ID NO: 21), 3.2×10⁻⁵; A41 F (SEQ ID NO: 22), 3.6×10⁻³; G64R (SEQ ID NO: 23), 2.2×10⁻³; T65N (SEQ ID NO: 24), 2.0×10⁻³; E99K (SEQ ID NO: 25), 1.9×10⁻³; I104R (SEQ ID NO: 26), 1.7×10⁻³; T114R (SEQ ID NO: 27), 2.7×10⁻³; R214C (SEQ ID NO: 28), 6.3×10⁻⁵; V2161 (SEQ ID NO: 29), 1.6×10⁻⁵; R265C (SEQ ID NO: 30), 3.8×10⁻⁴; R265H (SEQ ID NO: 31), 1.1×10-4; I326A (SEQ ID NO: 32), 4.6×10⁻⁵; I326V (SEQ ID NO: 33), 1.8×10⁻⁵; Q552L (SEQ ID NO: 34), 1.8×10⁻³; R672P (SEQ ID NO: 35), 3.4×10⁻³; and A694T (SEQ ID NO: 36), 1.7×10⁻⁵.

[0027] FIG. 3. This figure shows the mutation frequencies conferred by missense codons in the yeast MSH2 gene (SEQ ID NO: 2). Strain YBT25 containing pSH91 was transformed with pMETc/MSH2 (Complemented) or the indicated mutagenized form of pMETc/MSH2. Mutator refers to YBT25 containing pSH91 but without a pMetc/MSH2 plasmid, while WT refers to strain YBT5-1 containing pSH91 but without a pMetc/MSH2. Mutation frequencies were determined as described in Example 4. The mutant frequencies are presented as the mean±standard deviation of 6 replicate cultures of a single yeast clone that expresses the indicated MSH2 gene alteration. Mean mutation frequencies are: WT, 1. Ox10⁻⁵; Mutator, 2.4×10⁻³; Complemented, 1.4×10⁻⁵; G317D (SEQ ID NO: 37), 2.3×10⁻⁵.

[0028] FIGS. 4A-B. This figure illustrates the structure and function of hybrid human-yeast MLH1 proteins. (A) Schematic representation of the seven hybrid MLH1 proteins (SEQ ID NO: 38-44) in comparison to full-length native human (SEQ ID NO: 11) and yeast MLH1 (SEQ ID NO: 15). Portions of the hybrid protein representing human sequences are represented with solid bars. Numbers above each bar indicate the amino acid residue of the human portion of each gene. For hybrid genes where the fusion is within the protein coding region, the number of the flanking yeast residue is also indicated. The MMR defect (normalized to the strain expressing wild-type MLH1; (SEQ ID NO: 1) Materials and Methods) is listed to the right of each protein. (B) Mutation frequencies of yeast strains expresssing native and hybrid MLH1 proteins. Each hybrid gene was expressed in YBT24 containing pSH91 and assayed for MMR activity as described in Example 4. The mutant frequencies are presented as the mean±standard deviation of at least 4 replicate cultures of a single yeast clone that expresses the indicated hybrid protein. Mean mutation frequencies are: WT, 1.1×10⁻⁵; Mutator, 1.9×10⁻³; Complemented, 2.5×10⁻⁵; MLH1_h(1-177) (SEQ ID NO: 38), 1.0×10⁻³; MLH1_h(1-86) (SEQ ID NO: 39), 2.5×10⁻⁴; MLH1_h(41-130) (SEQ ID NO: 40), 2.1×10⁻⁴; MLH1_h(41-86) (SEQ ID NO: 41), 1.2×10⁻⁴; MLH1_h(77-134) (SEQ ID NO: 42), 5.4×10⁻⁵; MLH1_h(498-756) (SEQ ID NO: 43), 1.9×10⁻³; MLH1_h(498-584) (SEQ ID NO: 44), 1.8×10⁻³.

[0029] FIG. 5. This figure shows the mutation frequencies conferred by missense codons in human-yeast hybrid MLH1 genes. MLH1 Q62K (SEQ ID NO: 45) and R69K (SEQ ID NO: 46) alterations were made in a plasmid containing MLH1_h(41-86) (SEQ ID NO: 41). MLH1 S93G (SEQ ID NO: 47) was made in a plasmid containing MLH1_h(77-134) (SEQ ID NO: 42). The resulting constructs were introduced into YBT24 containing pSH91 (Mutator) and mutation frequencies determined as described in Example 4. The mutator strain complemented with the parental pMLH1_h(41-86) and pMLH1_h(77-134) constructs served as controls. Mutation frequencies are from a representative experiment and are presented as the mean±standard deviation of 5 replicate cultures of a single yeast clone that expresses the indicated missense alteration. Mean mutation frequencies are: Mutator, 2.1×10⁻³; Q62K (SEQ ID NO: 45), 2.0×10⁻⁴; R69K (SEQ ID NO: 46), 2.2×10⁻⁴; MLH1_h(41-86) (SEQ ID NO: 41), 1.2×10⁻⁴, S93G (SEQ ID NO: 47), 4.2×10⁻⁵, MLH1_h(77-134) (SEQ ID NO: 42), 4.9×10⁻⁵.

[0030] FIG. 6. This figure shows the mutation frequencies conferred by missense codons in the yeast MLH1 gene. Strain YBT24 containing pSH91 was transformed with pMLH1 (Complemented) or the indicated variant form of pMLH1. Mutator refers to YBT24 containing pSH91 but without a pMLH1 plasmid, while WT refers to strain YBT5-1 containing pSH91 but without a pMLH1 plasmid. Mutation frequencies were determined as described in Example 4. The mutant frequencies are presented as the mean±standard deviation of at least 4 replicate cultures of a single yeast clone that expresses the indicated MLH1 gene alteration. Mean mutation frequencies are: WT, 1.1×10⁻⁵; Mutator, 1.8×10⁻³; Complemented, 2.8×10⁻⁵; I22F (SEQ ID NO: 48), 2.47×10⁻⁴; I22T (SEQ ID NO: 49), 5.8×10⁻⁵; P25L (SEQ ID NO: 50), 4.09×10⁻⁴; N61S (SEQ ID NO: 51), 3.53×10⁻⁴; T79I (SEQ ID NO: 52), 1.68×10⁻³; K81E (SEQ ID NO: 53), 1.71×10⁻³; A108V (SEQ ID NO: 54), 7.84×10⁻⁴; V216L (SEQ ID NO: 55), 2.6×10⁻⁵; I262-del (SEQ ID NO: 56), 5.4×10⁻⁵; L666R (SEQ ID NO: 57), 3.29×10⁻⁴; P667L (SEQ ID NO: 58), 4.23×10⁻⁴; R672L (SEQ ID NO: 59), 3.6×10⁻⁵; E676D (SEQ ID NO: 60), 1.1×10⁻⁵; H733Y (SEQ ID NO: 61), 6.9×10⁻⁶; L744V (SEQ ID NO: 62), 1.3×10⁻⁵; K764R (SEQ ID NO: 63), 1.2×10⁻⁵; and R768W (SEQ ID NO: 64), 2.47×10⁻³.

### DETAILED DESCRIPTION OF THE INVENTION

[0031] The process of MMR is conserved from yeast to humans, as are the amino acid sequences of the protein functional domains. We previously described a standardized and quantitative in vivo assay of MMR in the yeast Saccharomyces cerevisiae which can be used for assessing the functional significance of missense codons (Polaczek et al., 1998). In the present invention, the effect of 20 amino acid replacements on MLH1p (SEQ ID NO: 15) and MSH2p (SEQ ID NO: 65) function were evaluated using a reporter gene which measures the stability of an in-frame (GT)₁₆ tract. Codon changes previously identified in human genes were introduced by site-directed mutagenesis at the homologous codon in the yeast gene and tested for in vivo function in S. cerevisiae. The present invention also demonstrates feasibility of constructing genes which encode hybrid human-yeast proteins that are functional in MMR in vivo. These hybrid genes allow functional assays of variant proteins containing human amino acid replacements at residues that are not conserved in yeast and/or where the equivalent residue in yeast is uncertain. There was a good correlation between the in vivo function of proteins with amino acid replacements and available human clinical data regarding penetrance of the missense codon. In addition to identification of silent polymorphisms and complete loss-of function mutations, it was discovered that certain codon changes in hMLH1 (SEQ ID NO: 7) and hMSH2 (SEQ ID NO: 3) give rise to proteins with a reduced efficiency of MMR. Some of these amino acid replacements occurred in individuals who developed CRC but whose families did not satisfy the criteria of HNPCC. These observations indicate that differences in the efficiency of DNA mismatch repair exist between individuals in the population due to common polymorphisms, and that such polymorphisms may predispose to early onset cancer.

[0032] In this invention, the functional significance of 37 different amino acid replacements in MLH1p and MSH2p was determined (SEQ ID NO: 21-37), (SEQ ID NO: 45-64). Codon changes were engineered into the yeast gene based on previous observation of the same amino acid replacement in the human protein and a potential implication of the missense variant in cancer development. Quantitative in vivo assays of DNA mismatch repair allowed classification of the amino acid replacements as either silent polymorphsims, loss-of-function mutations or efficiency polymorphisms. In addition to being causative of HNPCC, defects in MMR have been implicated in various sporadic cancers, including tumors of the colon (Borreson et al., 1995), leukemia and lymphoma (Hangaishi et al., 1997; Lowsky et al., 1997) and precancerous lesions and adenocarcinomas of the stomach (Semba et al., 1996). Therefore, analysis of genes involved in MMR will be useful for both presymptomatic susceptibility screening (1NPCC) as well as characterization of other pre-cancers and sporadic cancers. Data on the functional significance of the numerous missense codons being identified in these genes will be necessary for accurate and unambiguous interpretation of genetic test results.

[0033] The quantitative in vivo assay of MMR utilized in this study measured microsatellite instability of a (GT)₁₆ tract (Polaczek et al., 1998). Some of our results have been confirmed by investigators using different reporter genes to assess MMR activity (Table 2). Reversion rates of the hom3-10 allele, which detects—1 frameshift mutations (Marischky et al., 1996), was used to show that an A41 S alteration in yMLH1 (SEQ ID NO: 21) was silent while A4 IF (SEQ ID NO: 22) and G64R (SEQ ID NO: 23) replacements gave rise to mutant proteins (Pang et al., 1997). MLH1p variants with 165N (SEQ ID NO: 24) and Ti 14R (SEQ ID NO: 27) amino acid replacements were confirmed as mutants using reversion of the lys2::InsE-A₁₄ and his 7-2 alleles and forward mutation in to canavanine resistance (Shcherbakova & Kunkel, 1999). Reversion of the lys2::InsE-A₁₄ allele measures—1 frameshifts in a (A)₁₄ tract (Tran et al., 1997) while reversion of the his7-2 allele detects +1 and −2 frameshifts in an (A)₇ tract (Shcherbakova & Kunkel, 1999). The canavanine resistant can1 mutants detect a range of mutations including base substitutions, frameshifts, duplications, deletions, translocations and inversions (Chen & Kolodner, 1999; Marischky et al., 1996). In vivo functional results identical to ours but obtained using different reporter genes is consistent with the role of MLH1p and MSH2p in repairing a broad spectrum of DNA mismatches (Kolodner & Marisischky, 1999).

[0034] There is very good agreement between the results of our functional genetic tests (Table 2) and available human clinical data concerning the amino acid replacement (reviewed in (Peltomaki & Chapelle, 1997); see also http://www.nfdht.nl and references therein). Human variants corresponding to the yeast MLH1 A41F (SEQ ID NO: 22), 165N (SEQ ID NO: 24) and I104R (SEQ ID NO: 26) replacements were identified in HNPCC kindreds (families that satisfied the Amsterdam Criteria; (Vasen et al., 1991)) and shown to segregate with disease in these families (Bronner et al., 1994; Buerstedde et al., 1995; Hackman et al., 1997; Leach et al., 1993; Nystrom-Lahti et al., 1996; Tannergard et al., 1995). When these codon changes were introduced to the yeast gene, the variant protein was nonfunctional in MMR (mutant defect equivalent to the non-complemented mlh1Δ null strain), demonstrating these amino acid replacements to be loss-of-function mutations. Human variants corresponding to the yeast MLH1 G64R (SEQ ID NO: 23), Ti 14R (SEQ ID NO: 27), Q552L (SEQ ID NO: 34) and R672P (SEQ ID NO: 35) replacements were identified in HNPCC kindreds (Buerstedde et al., 1995; Hutter et al., 1996; Maliaka et al., 1996; Moslein et al., 1996; Nystrom-Lahti et al., 1996) but no data was available regarding segregation with disease. These amino acid replacements were shown here to be loss-of-function mutations. The human variant corresponding to the yeast MLH1 E99K (SEQ ID NO: 25) alteration was entered as an unpublished observation in the ICG-HNPCC mutation database without clinical information. This alteration is a loss of function mutation (Example 5).

[0035] The GenBank entry for human MLH1 has a V at amino acid position 219 while both I and L have been reported as common polymorphisms at this position with a population incidence which ranges from 31 to 83% in different geographic regions (Liu et al., 1995; Moslein et al., 1996; Tannergard et al., 1995). The high incidence in the population and lack of linkage to disease make it likely these alterations are silent polymorphisms. However, until this time no data on the in vivo function of these variant proteins was available. The native yeast gene contains V at this position and we demonstrated that a yeast MLH1protein with a V2161 (SEQ ID NO: 29) alteration retained full MMR function. Thus, an amino acid alteration suspected to be a polymorphism in humans was confirmed as a silent polymorphism in the functional studies reported here.

[0036] Four different amino acid substitutions (R214C (SEQ ID NO: 28), R265C (SEQ ID NO: 30), R265H (SEQ ID NO: 31), I326A(SEQ ID NO: 32) resulted in MLH1 proteins that are functional, but at reduced efficiency. That is, the efficiency of DNA mismatch repair in strains expressing these variants is intermediate between the mlh1Δ-null mutant and the null mutant complemented with the wild-type yeast gene. The R265H (SEQ ID NO: 31) variant was observed in an HNPCC family that satisfied the Amsterdam criteria and cosegregated with disease [Viel, 1997 #38]. However, this substitution occurred in the same allele which contained a frameshift and may have segregated with, but been unrelated to, cancer progression. The V326A allele in humans was identified in HNPCC kindreds (Buerstedde et al., 1995; Liu et al., 1996). The yeast gene encodes an I at this position, and substitution of a V is a silent polymporphism (Example 5). Replacement of this amino acid with an A, however, results in a protein with reduced activity. The R265C (SEQ ID NO: 30) variant was reported as a pathogenic mutation in the ICG-HNPCC database, citing unpublished data. The R214C (SEQ ID NO: 28) replacement was reported in two “suspected” HNPCC individuals from separate families that did not satisfy the Amsterdam criteria (Han et al., 1996; Miyaki et al., 1995). The data reported here demonstrate that amino acid replacements can result in partial inactivation of DNA mismatch repair, and such decreased efficiencies of MMR are associated with early onset colon cancer. We refer to these substitutions as efficiency polymorphisms.

[0037] The G322D alteration in hMSH2 (SEQ ID NO: 66) was initially identified in a family that satisfied the ICG criteria (Maliaka et al., 1996). A number of subsequent studies, however, identified this change in 1-6% of both sporadic cancers and unaffected controls (Liu et al., 1995; Tomlinson et al., 1997) suggesting that it might be a common polymorphism which cosegregated with another mutation in the HNPCC family. In our experiments, the yeast G317D allele (SEQ ID NO: 37) was functional since the mutation frequency was reduced over 100-fold when the variant was expressed in the msh2Δ-null mutant. This variant, however, appeared to have a slightly reduced efficiency of MMR compared to the wild-type yeast MSH2p (SEQ ID NO: 65). In a previous study (Drotschmann et al., 1999b), the yeast G317D allele partially complemented an msh2Δ-null mutant when expressed from a GAL10 promoter, but did not provide any complementation when expressed from the native MSH2 promoter using the lys2::InsE-A₁₄ reporter gene. Our results and those of Drotschmann, et al. (1999) demonstrate that the G317D allele is an efficiency polymorphism. The in vivo function of this variant, moreover, may be sensitive to the levels of expression.

[0038] The finding that the yeast protein with the A694T (SEQ ID NO: 36) replacement has full activity was unexpected. This missense codon was found in 3 individuals from separate HNPCC kindreds, and was reported to segregate with disease in these families (Froggatt et al., 1996). There are four possibilities why a clinical association with disease did not correlate with our functional data. First, there is the possibility that we did not target the correct codon in the yeast gene. In this 26 amino acid region of yeast MLH1p, the alanine represented only one of three amino acids which is perfectly conserved in the human protein. The computer-generated alignment, therefore, may be insufficient to unequivocally assign corresponding amino acids in this region. In this study, we demonstrated that hybrid human-yeast proteins can retain MMR function. Utilization of such functional hybrids in this region of MLH1p will overcome the limitations of computer-generated alignments. A second possibility is that the A694T variant retains the ability to repair mismatches in a (GT) microsatellite but is ineffective in repairing other types of mismatches. Use of reporter genes which measure repair of different mismatch structures can be used to address such possibilities. It was recently reported, using the lys2::InsE-A₁₄ reporter gene, that the A694T MLH1p variant is functional in MMR, is capable of interacting with PMS1p, and does not affect the mutator phenotype observed by overexpression of wild-type MLH1p (Shcherbakova et al., 2001). These results are consistent with our observations and support assigning this amino acid replacement in yeast as a silent polymorphism. Third, it is possible that the sequence alteration in humans functions as a mutation in a way other than effects of the amino acid substitution on protein function. For example, it has been recently demonstrated that some missense codons, as well as translationally silent point mutations, can cause exon skipping during the process of splicing (Liu et al., 2001). Finally, the clinical data may be incomplete or misleading.

[0039] In the experiments reported here, all variant genes were analyzed in the same yeast strain, utilizing the same reporter gene and identical gene expression conditions. The only difference in expression of the variant MMR genes was the altered codon. We did not evaluate steady-state protein levels, and thus did not determine whether some alterations affect protein stability. The MLH1 efficiency polymorphisms (R214C (SEQ ID NO: 28), R265C (SEQ ID NO: 30), R265H (SEQ ID NO: 31), 1326A (SEQ ID NO: 32)) were tested in the quantitative MMR assay at temperatures of 25° C. and 35° C. Both the mutation frequencies and MMR defects were identical to those observed at 30° C. (data not shown), suggesting that the decreased efficiency of these variants is not due to decreased protein stability. Irregardless of whether the amino acid replacement directly affects the process of MMR, or indirectly affects MMR through altered stability of the protein, the consequence for the cell is an increased mutation rate.

[0040] Our results demonstrate the feasibility of expressing hybrid human-yeast MMR proteins that are functional in vivo. Two hybrids that incorporated large regions from the C-terminal end of human MLH1 were not active in MMR. The C-terminal portion of yeast MLH1 p has been shown to interact with PMS1p (Pang et al., 1997). It is possible that the regions of the human protein (>86 amino acids; Results) that were incorporated into the hybrids do not functionally interact with yeast PMS1p and/or MLH1p. Based on the results with the N-terminal hybrids, it is expected that utilization of different smaller human coding sequences in the C-terminus will result in functional hybrids. Human-yeast hybrid proteins containing N-terminal regions of human MLH1 were functional and were used to determine the effect of missense replacements directly in the human coding sequence. In general, the efficiency of the hybrid protein in DNA mismatch repair was inversely correlated with the length of the human segment. The most efficient hybrid human-yeast MLH1p was functional in MMR at an efficiency within a factor of two of the native yeast protein (Example 7). The potential for making a series of hybrids to examine a wider range of human amino acid variants is now established.

[0041] A surprising finding in this study was that certain missense codons do not inactivate protein function but result in lower efficiency of DNA mismatch repair. Some of these amino acid replacements had a weak clinical association with cancer development. The substitutions were observed in individuals that developed CRC but whose families did not satisfy the criteria of HNPCC. These observations raise the intriguing possibility that differences in the efficiency of DNA mismatch repair exist between individuals in the population due to common polymorphisms. Certain polymorphisms could exhibit weak penetrance yet still predispose to cancer development. If true, this would predict a specific, genetically determined difference in susceptibility to cancer development. The systems described in this report will be useful for determining whether such genetic variation in the population exists and is associated with cancer development. Elucidation of such relationships may facilitate the future implementation of appropriate preventive strategies.

[0042] Genetic testing of individuals at a high risk to develop certain hereditary conditions is a powerful emerging strategy for the prevention of disease. However a persistent ambiguity will arise regarding the functional significance of missense codons identified by gene sequencing. If sufficient biochemical, clinical and population data are lacking, then it becomes impossible to state with confidence if a sequence variation is pathogenic or simply a natural variation in the human population. Systems for assessing the in vivo significance of amino acid replacements will increase the effectiveness of genetic testing programs.

### DESCRIPTION OF SPECIFIC EMBODIMENTS

[0043] The invention is further illustrated by way of the following examples, which are not intended to be limiting.

### EXAMPLE 1

### Materials and Methods

[0044] MLH1 and MSH2 Mutations and Polymorphisms

[0045] Human hMLH1 and hMSH2 missense codons that were examined in functional assays were previously reported in public databases maintained on-line by the ICG-HNPCC (http://www.nfdhtl.nl), Human Gene Mutation Database (http://www.uwcm.ac.uk) and Swiss-prot (http://Hwww.expasy.ch). The databases, which are partially overlapping, were last examined Dec. 31, 2000. Several other missense codons were also reported in publications and review articles as noted in the text.

[0046] Bacterial Strains, Growth Conditions and Plasmid Expression Vectors

[0047] E coli strains JM109, DH5a and XL1-Blue (Stratagene, La Jolla, Calif.) were used for construction and amplification of plasmids. Unless otherwise described, standard bacterial growth conditions and gene cloning methods were employed (Maniatis et al., 1989). Yeast centromeric expression vector pMETc contains a HIS3 selectable marker and a multicloning site positioned between the MET25 promoter and CYC1 terminator (p413MET25;(Mumberg et al., 1994)). Plasmid pSH91 is a yeast expression vector carrying the URA3 coding sequence containing an in-frame (GT)₁₆ tract (Strand et al., 1993).

[0048] Yeast MLH1 and MSH2 Expression Vectors

[0049] Expression of the yeast MSH2 gene (SEQ ID NO: 2) from plasmid pMETc/MSH2 was previously demonstrated to complement msh2 chromosomal mutations (Polaczek et al., 1998). For expression of MLH1p (SEQ ID NO: 15), the MLH1 gene coding region plus 1.5 kb of 5′ flanking DNA was amplified by PCR from S. cerevisiae strain S288C genomic DNA (Promega) with primers SEQ ID NO: 67 and SEQ ID NO: 68. The primers introduced a SacI restriction site 5′ to the MLH1promtoer region and an XhoI restriction site at 3′ to the MLH1 coding sequence. The 3.9-kb PCR product was restricted with SacI and XhoI and cloned between the unique SacI and XhoI sites of pMETc. This construction deleted the MET25 promoter and placed the expression of MLH1 coding sequences under control of the MLH1promoter.

[0050] Site-Directed Mutagenesis

[0051] Mutations were introduced into MMR genes using the QuikChange Site-Directed Mutagenesis kit (Stratagene, La Jolla, Calif.) following the manufacturer's instructions. The protocol employs multiple rounds of synthesis with PfuI DNA polymerase using plasmid DNA as template, but no amplification of the in vitro product. Templates for the mutagenesis reaction were as follows: a plasmid containing MLH1 for MLH1 variants A41 F (SEQ ID NO: 22), A41 S (SEQ ID NO: 21), G64R (SEQ ID NO: 23), 165N (SEQ ID NO: 24), E99K (SEQ ID NO: 25), 1104R (SEQ ID NO: 26), T114R (SEQ ID NO: 27), R214C (SEQ ID NO: 28), V216I (SEQ ID NO: 29), R265C (SEQ ID NO: 30), R265H (SEQ ID NO: 31), 1326A (SEQ ID NO: 32), 1326V (SEQ ID NO: 33), Q552L (SEQ ID NO: 34), R672P (SEQ ID NO: 35) and A694T (SEQ ID NO: 36); a plasmid containing MSH2 for yMSH2 variant G317D (SEQ ID NO: 37); a plasmid containing MLH1_h(41-86) for hMLH1 variants Q62K (SEQ ID NO: 45) and R69K (SEQ ID NO: 45); and a plasmid containing MLH1_h(77-134) (SEQ ID NO: 42) for hMLH1 variant S93G (SEQ ID NO: 47). Sense and antisense oligonucleotide primers were PAGE-purified and, to facilitate screening for mutant clones, included a silent restriction site change in addition to the desired missense alteration (Table 1). For all mutations, at least three independent mutant clones were tested for function in yeast with identical results. At least one clone that contained the appropriate restriction site alteration was sequenced on both strands over the region of interest to confirm the mutation and verify the native sequence over at least 100 bp on either side of the introduced mutation. The data presented are derived from replicate cultures of a single mutant clone that had been confirmed by DNA sequence analysis.

[0052] PCR

[0053] Routine PCR was carried out with approximately 3 ng plasmid DNA or 400 ng genomic DNA in reaction mixtures containing 50 mM KCl, 10 mM Tris-HCl (pH 9.0), 2.5 mM MgCl₂, 200 μM each of dNTPs, 0.1% Triton X-100, 1% DMSO, 0.04 U/μl Taq polymerase (Promega, Madison, Wis.), and 0.1 μM forward and reverse primers. PCR conditions were as follows: 2 min at 94° C., followed by 35 cycles of 36 sec at 94° C., 150 sec at 55° C., and 150 sec at 72° C. and finished with a 10 min incubation at 72° C. When high-fidelity PCR was required, such as for the production of DNA fragments for generating hybrid human-yeast genes, Pfu DNA polymerase (Stratagene) and PCR conditions recommended by the manufacturer were used.

[0054] DNA Sequencing

[0055] DNA sequencing was performed at commercial sequencing facilities using ABI BigDye Terminator chemistry and ABI automated DNA sequencers (models 377 and 3700).

[0056] Statistical Analysis

[0057] Differences in mutant frequencies between yeast strains were assessed by Anova Multiple Student's T-test (Statview 4.5). P values of <0.05 were considered significant.

### EXAMPLE 2

### Construction of Hybrid Human-Yeast MLH1 Genes

[0058] Genes encoding hybrid human-yeast MLH1 proteins were constructed by replacing portions of the yeast MLH1 gene (SEQ ID NO: 1) with the homologous human coding sequence from the hMLH1 gene (SEQ ID NO: 7). The hybrid constructions were designed to maintain the open reading frame and precisely substitute conserved regions between the human and yeast proteins. DNA sequencing was performed to verify correct clones. DNA sequences of the cloned human fragments were found to exactly match the Genbank report (accession #U07418).

[0059] Hybrid MLH1-h(1-177) (SEQ ID NO: 38) was constructed by overlap extension PCR using previously described strategies (Bitter, 1998). A 591-bp fragment containing the yeast MLH1 5′ regulatory region (nucleotides −586 to +6 relative to A of translation initiator codon) was amplified from S. cerevisae S288C genomic DNA using primers SEQ ID NO: 109 and SEQ ID NO: 110. Codons 3-177 of human MLH1 were amplified from a hMLH1 cDNA clone (ATCC # 217884; the first two yeast and human amino acids are identical) using primers SEQ ID NO: 111 and SEQ ID NO: 112. A 1.8-kb C-terminal portion of yeast MLH1, including codons 174 to 769, was amplified with primers SEQ ID NO: 113 and SEQ ID NO: 68. Approximately equimolar ratios of the three fragments were combined and amplified with primers SEQ ID NO: 109 and SEQ ID NO: 68. The resulting 2.9-kb overlap extension product was gel purified, digested with AflII and XhoI and cloned into plasmid pMLH1, replacing the native MLH1 gene.

[0060] Hybrid MLH1_h(1-86) (SEQ ID NO: 39) was constructed using a 2-piece overlap extension reaction. A fragment of the human hMLH1 (SEQ ID NO: 7) cDNA containing codons 3-86 was amplified by PCR using primers SEQ ID NO: 111 and SEQ ID NO: 114. The 255-bp PCR product was diluted and mixed with an approximately equimolar amount of the 591-bp yeast MLH1 5′ regulatory region fragment (described above) and overlap extension PCR was carried out using primers SEQ ID NO: 109 and SEQ ID NO: 114. The 0.85-kb overlap extension product was digested with AflII and AatII and cloned into plasmid pMLH1, replacing the native yeast MLH1 segment.

[0061] Hybrid MLH1_h(41-130) (SEQ ID NO: 40) was constructed by cloning a 285-bp fragment of the human hMLH1 cDNA containing codons 41-130 between the ClaI and NdeI sites in pMLH1 and replacing codons 38-126 of the native yeast MLH1 gene. The human fragment was amplified using primers SEQ ID 115 and SEQ ID 116, which introduce ClaI and NdeI sites, respectively. The PCR product was digested with ClaI and NdeI to allow in-frame cloning into the yeast MLH1 gene which had been subcloned as a SacI-XhoI fragment into pBluescript II (Stratagene). The hybrid MLH1 gene was subsequently recloned into pMLH1, replacing the native yeast gene.

[0062] Hybrid MLH1 h(41-86) (SEQ ID NO: 41) was constructed by PCR amplification of a 140-bp fragment containing codons 41-86 of the hMLH1 cDNA and direct cloning into the yeast MLH1 gene between the ClaI and AatII sites. The human segment was amplified with primers SEQ ID NO: 115 and SEQ ID NO: 114, which introduce ClaI and AatII sites, respectively. The PCR product was digested with ClaI and AatI to allow in-frame cloning into the yeast MLH1 gene in expression vector pMLH1.

[0063] Hybrid MLH1_h(77-134) (SEQ ID NO: 42) was constructed in a 2-piece overlap extension reaction. A 170-bp fragment of the hMLH1 gene containing codons 77-134 was PCR amplified using primers SEQ ID NO: 117 and SEQ ID NO: 118, which introduces an AatII site at the 5′ end. A 1.9-kb fragment of yeast MLH1 containing codons 132 to 769 was amplified by PCR using primers SEQ ID NO: 119 and SEQ ID NO: 68. The two fragments were gel purified, diluted, mixed in equimolar amounts and amplified using primers SEQ ID NO: 117 and SEQ ID NO: 68. The overlap extension product was digested with AatII and XhoI to allow in-frame cloning into pMLH1, replacing the native yeast MLH1 gene.

[0064] Hybrid MLH1_h(498-756) (SEQ ID NO: 43) was constructed by direct cloning of a 829-bp fragment containing codons 498-756 of human hMLH1 into the yeast gene. The human fragment was amplified by PCR using primers SEQ ID NO: 120 and SEQ ID NO: 121. These introduce a Bsu36I site at the 5′ end and an XhoI site at the 3′ end and allow in-frame cloning into the yeast MLH1 gene in pMLH1 as a Bsu36I-XhoI fragment, replacing codons 506 to 769 of the yeast gene.

[0065] Hybrid MLH1_h(498-584) (SEQ ID NO: 44) was constructed using a 2-piece overlap extension reaction. A 290-bp fragment of hMLH1 containing codons 498-584 was PCR amplified with primers SEQ ID NO: 120 and SEQ ID NO: 122. A 560-bp fragment of yeast MLH1, containing codons 595-769, was amplified with primers SEQ ID NO: 123 and SEQ ID NO: 68. Approximately equimolar amounts of each fragment were mixed and subjected to overlap extension PCR using primers SEQ ID NO: 44 and SEQ ID NO: 68. The approximately 800-bp product was digested with Bsu36I and XhoI for replacement of the equivalent fragment in pMLH1.

### EXAMPLE 3

### Yeast Strains, Growth Conditions and Transformations

[0066] All yeast strains used in this invention are derivatives of S. cerevisae YPH500 which has the genotype MATα ade2-101 his3-Δ200 leu2-Δ1 lys2-801 trp1-A63 ura3-5 (Sikorski & Hieter, 1989). Strain YBT5-1 was described previously (Polaczek et al., 1998) and has the genotype MATα ade2-101 his3-A200 lys2-801 trpl-A63 ura3-52.

[0067] Strain YBT24 (MATα ade2-101 his3-A200 leu2-Δ1 lys2-801 trp1-A63 ura3-52 mlh1Δ::LEU2) contains a deletion of the entire MLH1 coding region and was generated by chromosomal targeting using a DNA fragment constructed by overlap extension PCR procedures (Bitter, 1998). Briefly, nucleotides −140 to +6 of yeast MLH1 (SEQ ID NO: 1)) (relative to the A of the translation initiator codon at +1) and nucleotides 2299 (termination codon at 2306) to 2684 were PCR amplified from S. cerevisiae S288C genomic DNA. The yeast LEU2 gene coding region plus 440 bp of 5′ flanking and 40 bp of 3′ flanking DNA was also PCR amplified from S. cerevisiae S288C genomic DNA. The 5′ end of the LEU25′ primer was homologous to the MLH1 upstream 3′ primer while the 5′ end of the MLH1 downstream 5′ primer was homologous to the LEU23′ primer. Approximately equimolar amounts of each PCR product were mixed and subjected to overlap extension PCR using the outermost MLH15′ and 3′ primers. The resulting 2.2-kb MLH15′-LEU2-MLH13′ fusion was transformed into S. cerevisiae strain YPH500 and leucine prototrophs were selected. Genomic DNA was isolated from one clone, strain YBT24, which exhibited a mutator phenotype using the pSH91 reporter gene and confirmed by PCR analysis to have the entire MLH1 coding region deleted and replaced by the LEU2 gene (data not shown). Strain YBT25 (MATα ade2-101 his3-A200 leu2-Δ1, lys2-801 trp1-Δ63 ura3-52 msh2Δ::LEU2) contains a deletion of MSH2 from codon 2 through the termination codon. Generation, selection and confirmation of YBT25 was similar to construction of YBT24 except that a MSH25′-LEU2-MSH23′ overlap extension product was used for gene targeting.

[0068] The MMR reporter plasmid pSH91 (Strand et al., 1993) was transformed into strains YBT5-1, YBT24 and YBT25, selecting for tryptophan prototrophs. The strains were maintained in SD medium supplemented with adenine, histidine and lysine. The additional selection for uracil prototrophy maintains the cultures with 100% of the pSH91 containing an in-frame (GT) tract. YBT24 and YBT25 containing pSH91 were also transformed with pMLH1 and pMetc/MSH2, respectively, and maintained on SD medium supplemented with adenine and lysine. Transformations were carried out by the polyethylene glycol-lithium acetate method (Ito et al., 1983). Yeast strains were stored at −80° C. in 15% glycerol.

### EXAMPLE 4

### In Vivo MMR Assay

[0069] The standardized in vivo assay for DNA mismatch repair has been described in detail elsewhere (Polaczek et al., 1998). The assay is based on instability of 33-bp (GT)₁₆ tract which is inserted in-frame in the 5′end of the yeast URA3 gene coding region in plasmid pSH91. The (GT)₁₆ microsatellite is unstable during DNA replication and, if insertion/deletion loops are not repaired by MMR, ura3 mutants form due to frameshift mutations. Selection on plates containing 5-fluoroorotic acid (FOA) is used to quantitate ura3 mutants (Boeke et al., 1984). Briefly, yeast strains were grown for 24 hours in SD media (0.67% yeast nitrogen base without amino acids, 2% dextrose) supplemented with adenine and lysine. An additional supplement of histidine was included for strains that did not carry MLH1 or MSH2 expression vectors. An equivalent volume of cells from each saturated culture was subcultured (1:100) into fresh media containing the same supplements as above plus uracil, and grown an additional 24 hours. The presence of uracil allows growth of any newly formed ura3 mutants in this culture. After overnight growth to saturation, aliquots (25 and 100 μl) of each culture were plated on SD plates containing adenine, lysine, uracil and 1 mg/ml FOA to determine the concentration (cells/ml) of ura3 mutants. The concentration (cells/ml) of total viable plasmid containing cells was determined by serial dilution and plating on SD plates supplemented with adenine, lysine and uracil. Additional supplementation with histidine was included if the strain did not carry MLH1 or MSH2 expression vectors. Colonies were counted 2-3 days later. Mutant frequencies were calculated by dividing the concentration of FOA-resistant colonies by the concentration of viable cells. At least four independent cultures of each yeast strain carrying variant MMR genes were assayed. The MMR defect is defined as the ratio of the mutation frequency in the test strain divided by that observed in the same strain complemented with the wild-type yeast gene.

### EXAMPLE 5

### Functional Assay of Mlh1p Variants Containing Amino Acid Replacements

[0070] Function of the MMR protein variants was determined using a standardized MMR assay that measures stability of a (GT)₁₆ tract in vivo (Polaczek et al., 1998). For these experiments, we constructed haploid yeast strains that have complete deletions of the chromosomal coding region of MLH1 (strain YBT24) or MSH2 (strain YBT25). Utilizing the reporter gene (GT)₁₆-URA3 (pSH91; Materials and Methods), both YBT24 and YBT25 exhibit a mutation frequency (Materials and Methods) more than 100-fold greater than a MMR wild-type strain. As demonstrated below, the mutation frequency can be reduced to approximately that observed in the wild-type strain by complementing the chromosomal null mutations with a plasmid expressed (Materials and Methods) wild-type yeast MLH1 (strain YBT24) or MSH2 (strain YBT25) gene. The mean mutant frequency in plasmid-complemented chromosomal null mutants was used as the basis for comparing activity of the variant MMR proteins described below. MMR defect is defined as the mutant frequency conferred by the variant protein in the chromosomal null mutant divided by the mutant frequency observed in the chromosomal null mutant expressing the wild-type yeast gene. All MLH1 or MSH2 variants were analyzed in the same host containing the same reporter gene and were expressed from the same expression vector as the wild-type yeast gene. For all mutagenized genes, at least three independent clones were tested for MMR function with identical results. The DNA sequence on both strands of the mutagenized gene was confirmed for one mutant, and this clone was assayed in replicate cultures (n>4) for determination of the mutation frequencies reported below.

[0071] MLH1 orthologs from various organisms, including yeast and humans, were aligned to identify homologous amino acid residues (FIG. 1). These alignments, together with previously identified human missense codons, were used to target yeast residues for alterations that would mimic variants observed in the human population (Table 1). Strain YBT24 (“Mutator”, FIG. 2), exhibited a mutation frequency of 1.8×10⁻³, a level 160-fold higher than that exhibited by the wild-type parental strain YBT5-1. When the wild-type MLH1 gene (SEQ ID NO: 1) was expressed from a plasmid in YBT24 (“Complemented”, FIG. 2) the mutation frequency was reduced over 65-fold to nearly the wild-type levels. Cells expressing MLH1p with the amino acid replacements A4° F. (SEQ ID NO: 22), G64R (SEQ ID NO: 23), 165N(SEQ ID NO: 24), E99K (SEQ ID NO: 25), 1104R (SEQ ID NO: 26), Ti 14R (SEQ ID NO: 27), Q552L (SEQ ID NO: 34), and R672P (SEQ ID NO: 35) exhibited mutation frequencies of 1.7-3.6×10⁻³ (FIG. 2). These mutation frequencies represent MMR defects of 62 to 130. Statistical analyses showed these differences from the strain complemented with wild-type MLH1 to be highly significant (P<0.0001). In contrast, the mutation frequencies were not significantly different from that exhibited by the mlh1Δ deletion strain YBT24 which lacked a complementing plasmid (“Mutator”; FIG. 2). These results demonstrate that amino acid replacements A41F, G64R, 165N, E99K, 1104R, T114R, Q552L, and R672P result in complete loss of MLH1p function. These missense codons are, therefore, mutations.

[0072] Strain YBT24 expressing the A41S (SEQ ID NO: 21), V2161 (SEQ ID NO: 29), 1326V (SEQ ID NO: 33) or A694T (SEQ ID NO: 36) variants exhibited mutation frequencies of 1.0-3.2×10⁻⁵, which were not significantly different from the mutation frequency observed when strain YBT24 expressed the wild-type yeast MLH1 gene (“Complemented”; FIG. 2). The A41S and 1326V are conservative amino acid replacements. These codon changes convert the wild-type yeast residue to the amino acid in the corresponding position of the wild-type human protein. The data in FIG. 2 demonstrate that the A41S, V2161, 1326V and A694T amino acid replacements do not detectably alter MLH1p function, and therefore represent silent polymorphisms (see Description of Specific Embodiments).

[0073] Four of the codon changes in MLH1 encode proteins which appear to support intermediate efficiencies of DNA mismatch repair. The R214C (SEQ ID NO: 28), R265C (SEQ ID NO: 30), R265H (SEQ ID NO: 31) and 1326A (SEQ ID NO: 32) amino acid changes exhibit MMR defects of 2.3, 13.8, 4.0 and 1.7, respectively, which is intermediate between that of the wild-type MLH1 complemented mutant (MMR defect=1.0) and the mlh1Δ null mutant (MMR defect=65). The mutation frequencies measured with the R214C, R265C, R265H and 1326A amino acid replacements are significantly less than the mlh1Δ null mutant lacking a complementing plasmid. ANOVA/Multiple Student's T-tests statistical analyses of the mutation frequencies in each variant verses the mlhl1Δ null mutant yield P-values of less than 0.0005 in all cases. The mutation frequencies of the R214C, R265C and R265H variants are clearly different from the strain complemented with the wild-type MLH1 gene with P-values of, respectively, 0.0005, 0.0001 and 0.0001. The 1.6-fold MMR defect of the 1326A variant also appears to be significant (P=0.0279) compared to the strain expressing wild-type MLH1. These results demonstrate that the R214C, R265C, R265H and 1326A are not complete loss-of-function mutations since the MMR defect is considerably lower than that observed in the mlh1Δ null mutant. However, since the MMR defect is significantly greater than in the strain complemented with the wild-type protein, these missense variants function in DNA mismatch repair at a reduced efficiency (efficiency polymorphisms).

### EXAMPLE 6

### Functional Assay of MSH2p Variant

[0074] Previous work from this laboratory demonstrated that a P640L alteration in yeast MSH2p (SEQ ID NO: 124) was a loss-of-function mutation while a H658Y (SEQ ID NO: 125) alteration had no effect on protein function (Polaczek et al., 1998). In the current study, an additional amino acid replacement, G317D (SEQ ID NO: 37), in yeast MSH2p was evaluated. Mutation frequencies of strain YBT25 expressing the G317D allele was determined and compared (FIG. 3) to strain YBT25 without a complementing gene (“Mutator”) and YBT25 complemented with the wild-type MSH2 gene (“Complemented”). The strain expressing the G317D variant exhibited a low mutation frequency (2.3×10⁻⁵) that was significantly less than msh2Δ null mutant, demonstrating MMR activity of the protein variant. Cells expressing G317D, however, exhibit a MMR defect of 1.7, and this difference from YBT25 complemented with wild-type MSH2 (SEQ ID NO: 2) appears significant (P=0.0073). These results indicate that the G317D replacement encodes a functional protein of slightly reduced efficiency in MMR.

### EXAMPLE 7

### Construction of Hybrid Human-Yeast Genes Which Encode MLH1 Proteins Functional in MMR In Vivo

[0075] A substantial number of the amino acid residues in human MLH1 (SEQ ID NO: 11), which have been linked to the development of HNPCC, are not conserved in the yeast protein. As shown above (for the human S44F (SEQ ID NO: 126) and V326A (SEQ ID NO: 127) variants), alterations at non-conserved residues can be evaluated by replacing the corresponding yeast codon with that found in the native human gene. If the change is a silent polymorphism, the effect of the variant human codon can subsequently be analyzed in yeast. The utility of this approach, however, may be limited. In some cases the wild-type human amino acid may not functionally replace the yeast amino acid, or there may be instances in which the homology between the human and yeast genes is too weak to unambiguously assign the corresponding yeast codon. An alternative approach would be to construct gene fusions that encode hybrid human-yeast proteins which retain MMR function in vivo.

[0076] Seven gene fusions were constructed (Example 2) by replacing a portion of the yeast MLH1 gene with the homologous coding sequence from the human gene (FIG. 4A). The gene fusions were expressed from the same parental expression vector (Materials and Methods) in mlh1Δ null strain YBT24 and quantitative MMR assays were carried out to evaluate function of the hybrid human-yeast protein (FIG. 4B). Complementation of the mlh1Δ null strain was not observed with two hybrids, MLH1_h(498-756) (SEQ ID NO: 43) and MLH1_h(498-584) (SEQ ID NO: 44), that contain portions of the human C-terminal domain (FIG. 4B). In contrast, five hybrids that contained portions of the human N-terminal domain complemented strain YBT24, yielding substantial reductions in mutation frequency (FIG. 4B). The functional hybrid proteins spanned amino acids 1-177 and conferred mutation frequencies that tended to correlate with the length of the human portion of the hybrid protein. Whereas the mlh1α-null strain exhibited a MMR defect of 74.5, strains expressing hybrids MLH1_h(1-177) (SEQ ID NO: 38), MLH1_h(1-86) (SEQ ID NO: 38), MLH1_h(41-130) (SEQ ID NO: 40), and MLH1_h(41-86) (SEQ ID NO: 41) exhibited, respectively, MMR defects of 39.6, 9.9, 8.5 and 4.8. The most efficient hybrid was MLH1_h(77-134) (SEQ ID NO: 42), containing a 57 amino acid segment from the human coding sequence, which conferred an efficiency of DNA mismatch repair which is within a factor of 2 of the wild-type native yeast protein.

### EXAMPLE 8

### Evaluation of Functional Significance of Amino Acid Replacements in Human Portion of Hybrid Human-Yeast MLH1 Proteins

[0077] Missense codons were introduced into the human coding sequence of hybrid human-yeast genes to evaluate human amino acid replacements at residues that are not conserved in yeast. Three replacements (Q62K (SEQ ID NO: 45), R69K (SEQ ID NO: 46), S93G (SEQ ID NO: 47)) that appear in one or more of the MLH1 mutation databases were engineered by site-directed mutagenesis into an appropriate gene fusion. These genes were expressed in strain YBT24 and mutation frequencies compared to that obtained with the gene encoding the original hybrid human-yeast protein. Cells that expressed hybrid proteins with these three missense changes had mutation frequencies that were not significantly different than cells that expressed the control hybrid protein (FIG. 5). These results demonstrate that the hMLH1 S93G alteration confers no loss-of-function when present in the human portion of the hybrid protein and, thus, is a silent polymorphism while the Q62K and R69K replacements are functional at reduced efficiency and are thus efficiency polymorphisms.

### EXAMPLE 9

### Additional Reporter Genes for Functional MMR Assay

[0078] Additional reporter genes are evaluated for two purposes. First, it is possible that some amino acid replacements in MMR proteins may affect mismatch repair on certain DNA structures but not others. Although MSH2p (SEQ ID NO: 65) and MLH1p (SEQ ID NO: 15) are involved in repair of a large number of different DNA mismatch structures, it is possible that minor changes, such as amino acid replacements, in either protein may affect repair of only a subset of these structures. Thus, analyses are performed for each variant using multiple reporter genes. Second, the discovery of amino acid replacements which are not inactivating mutations but which result in decreased efficiency of DNA mismatch repair (Example 5) suggest that common polymorphisms may result in differences in efficiency of DNA mismatch repair. To improve the technology for addressing the function of these variants, additional reporter genes are evaluated for use in sensitive and quantitative DNA mismatch repair assays.

[0079] Reporter genes that have been utilized by various investigators to study DNA mismatch repair in yeast are summarized in Table 3. The type of mismatch repaired, the selection used to measure mutant frequencies and the MMR defect (mutant frequency observed in a msh2 or mlh1 mutant relative to wild type) is indicated for each reporter gene. The CAN1 gene encodes an arginine permease which is also the sole route of entry into yeast of the toxic compound canavanine. CAN1 mutants can thus be quantitated by growth in the presence of canavanine, and this selection has been shown to detect a wide range of mutations including base substitutions, frameshifts, duplications, deletions, translocations and inversions (Chen & Kolodner, 1999; Marischky et al., 1996). It is likely that utilization of the native URA3 gene (lacking a GT tract) as a reporter would reveal a similar spectrum of mutations which can be selected by resistance to 5-fluoroorotic acid (FOA). Several other reporter genes (Table V) have been described for which the MMR defect is greater than the (GT)₁₆-URA3 reporter used during Phase I. The increased sensitivity of such reporter genes may be useful for studying MLH1p or MSH2p variants which result in decreased efficiency of DNA mismatch repair (Phase I report).

[0080] Two reporter genes in addition to the (GT)₁₆-URA3 reporter (Phase I) are utilized in the functional assays (Section 4.B). The CAN1 reporter is utilized since the forward mutation assay has been shown to detect a broad spectrum of mutations. This will ensure that protein variants containing amino acid replacements which affect repair of only a subset of the possible mismatch structures are detected. The yeast strains YBT5-1, YBT24 and YBT25 are wild type for CAN1, and no further engineering will be required. A reporter gene which yields a greater MMR defect than the (GT)₁₆-URA3 reporter is also used. For example, Tran et al. (1997) constructed a series of yeast strains with homonucleotide runs of 4 to 14 A residues which produced frameshifts in the same region of the chromosomal LYS2 gene. Generally, the greater the length of the A tract, the greater was the MMR defect, reaching a maximum of 10,000 at 14 residues (Tran et al., 1997). The increased sensitivity of such a reporter gene may allow more precise functional assays of protein variants with altered efficiency of DNA mismatch repair. Srains containing such a reporter gene and which are isogenic except for the absence or presence of either a msh2A or mlh1Δ chromosomal null mutation are constructed using procedures analogous to those described in Example 3.

[0081] The reporter genes for sensitive/quantitative MMR assays are evaluated using the MLH1p R214C (SEQ ID NO: 28), R265C (SEQ ID NO: 30), R265H (SEQ ID NO: 31) and 1326A (SEQ ID NO: 32) variants (which retained MMR function but at a lower efficiency than wild type; Example 5). These amino acid replacements resulted in MMR defects measured on the (GT)₁₆-URA3 reporter gene of 2.25, 13.6, 3.9 and 1.6, respectively. In this system, the mlh1Δ null mutant (YBT24) exhibits a MMR defect of 65 (relative to YBT24 expressing a wild type MLH1p from a plasmid). A reporter gene that exhibits a greater MMR defect (e.g 10,000) allows identification and characterization of a broader spectrum of polymorphisms which result in altered efficiencies. This is evident by a greater MMR defect for the above variants, as well as a greater difference between the variants.

### EXAMPLE 10

### Secondary Assay

[0082] Secondary assays are utilized to confirm results obtained with the primary MMR functional assay (Example 4), and for generating additional information regarding the protein variant.

[0083] There is very good correlation between human clinical data on missense codons and the results of functional assays in yeast (Examples 5, 6, 8). Thus, the in vivo MMR assays in yeast appear to be predictive of protein function in humans. These assays are utilized to establish the functional significance of missense codons observed in the human hMSH2 and hMLH1 genes. There may be instances in which it seems desirable to confirm the results obtained in the primary MMR assay. In these cases, the codon change of interest is introduced into the native human gene (wild type hMSH2 (SEQ ID NO: 3) and hMLH1 (SEQ ID NO: 7)) cDNA clones, expressed in a wild type yeast strain (YBT5-1) and tested in the yeast dominant mutator assay (Clark et al., 1999; Shimodaira et al., 1998). Loss of the dominant mutator effect is consistent with a mutation, whereas no effect is consistent with the variant being a silent polymorphism.

[0084] The initial elucidation of defects in MMR as causative of HNPCC (Bronner et al., 1994; Fishel et al., 1993; Leach et al., 1993; Nicolaides et al., 1994; Papadopoulos et al., 1994) was prompted by the well documented microsatellite instability in colon cancers and the observation that DNA microsatellites are particularly unstable in yeast strains which are deficient in MMR (Strand et al., 1993). It was postulated that affected HNPCC individuals are born heterozygous for a mutation in one MMR gene and, after loss of heterozygosity due to a somatic mutation in the other allele, the resulting cell becomes a mutator. Some of these pre-cancer cells subsequently form colorectal tumors. In a subsequent study, it was demonstrated that naturally occurring mutant forms of hPMS1 function as dominant negative mutants in human cells (Nicolaides et al., 1998). That is, when expressed in a cell containing a wild type allele of the gene, the cell exhibits an elevated mutation rate. The phenomenon of dominant negative mutants of MMR proteins has also been well documented in yeast (Das Gupta & Kolodner, 2000; Drotschmann et al., 1999b; Shcherbakova & Kunkel, 1999). These observations have significance for genetic testing for HNPCC and other pre-cancers associated with defects in MMR. If a mutation is documented in one allele with the other allele remaining wild type, the cell will have a mutator phenotype if the first mutation is a dominant negative. The risk for progression to cancer is much greater for such cells, so this information will be valuable for patient counseling and management. For the amino acid replacements which are demonstrated to be mutants, it is subsequently determined whether the variant protein functions as a dominant negative mutant. The yeast expression systems (Examples 3,4) which allow complementation of chromosomal null mutants by the plasmid expressed wild type gene are used for these studies. The mutant genes are expressed in a MMR wild type strain (YBT5-1) to test for dominant negative activity.

[0085] Protein expression levels are measured by immunoblot analysis. For in vivo functional analyses, all genes are analyzed in the same yeast host containing the same reporter gene and are expressed from the same stable, single copy expression vector. The only difference in strains is the nucleotide sequence around the codon change, and the transcripitional efficiency of all genes should be equivalent. Expression of each variant protein is confirmed and quantitated relative to the wild type. Most variant proteins are expressed at levels comparable to wild type, and the functional consequences of the amino acid replacement are therefore directly attributable to effects in the process of MMR. Instances in which the variant protein is expressed less efficiently than wild type suggest that the mechanism leading to defective DNA mismatch repair for such a mutant is decreased protein stability. Epitope tagged yeast MMR proteins are also used for immonoblot analyses, but these may have subtle differences in MMR activity. Therefore, polyclonal antisera to synthetic peptides derived from the native yeast protein sequence (e.g. ref. (Drotschmann et al., 1999b)) are used for immunoblot analyses.

### EXAMPLE 11

### Additional Hybrid Human-Yeast MSH2 and MLH1 Genes

[0086] Utilization of hybrid genes encoding functional MMR proteins in which regions of yeast MSH2p (SEQ ID NO: 65) and MLH1p (SEQ ID NO: 15) are replaced by the homologous region from the human protein will further support interpretation of results obtained in yeast assays to be predictive of function in human cells. The hybrid genes will also allow assessment of the functional consequences of human amino acid replacements in regions where the homology is too weak to clearly identify the corresponding yeast residue. Finally, hybrid genes engineered such that the human segment is flanked by restriction enzyme recognition sites which are unique in the expression vector will allow random mutagenesis of the human coding region and selection of inactivating mutations.

[0087] A series of hybrid genes is constructed such that all regions of the human MSH2 (SEQ ID NO: 3) and MLH1 coding region (SEQ ID NO: 7) will be present in at least one functional hybrid protein. The technique of overlap extension PCR (Example 2) is used to construct these hybrid genes. The hybrid proteins are tested for function in vivo in strains YBT24 (MLH1 hybrids) or YBT25 (MSH2 hybrids).

[0088] Example 7 demonstrated the feasibility of constructing genes encoding functional hybrid human-yeast MMR proteins. To obtain functional hybrids with MMR efficiency equivalent to the wild type yeast protein, it appears to be necessary to limit the size of the human coding region. Attempts are made to generate functional hybrids with the largest possible human coding regions. Consideration is given, in designing such hybrids, to published data on the crystal structures (e.g. (Ban & Yang, 1998; Lamers et al., 2000; Obmolova et al., 2000)), functional domains and protein interacting regions of the MMR proteins. Additionally, restriction sites which do not alter the protein coding sequence and which are unique in the expression vector are incorporated at the ends of the human coding sequences. This will allow random mutagenesis by error prone PCR for the purpose of selecting inactivating mutations (Examples 12, 13). If it is not possible to engineer in such sites without changing the protein sequence, then nearby unique sites in the yeast coding region are used for subcloning mutagenized PCR fragments. There is the possibility that certain regions of human protein can not be incorporated into functional hybrids which are as efficient as the native yeast MLH1p (SEQ ID NO: 15). In such cases, if the hybrids exhibit significantly increased MMR activity relative to the null mutant and are only several fold less efficient than the wild type yeast protein, then they are used for retrospective and prospective analyses (Example 13). The hybrid-human yeast protein is used as the control value to which the test genes are normalized.

### EXAMPLE 12

### Positive Genetic Selections in Yeast for Mutant MMR Proteins

[0089] These selections are used for prospective analyses of mutations (Example 13).

[0090] The significance of variant MMR proteins can be assessed retrospectively (Example 13). An alternative approach is to utilize a model system to define missense codons which inactivate protein function. The data generated with such technology can be used to interpret the significance of amino acid replacements which, in the future, are observed in human proteins. Such data also provides valuable structure/function information for basic research on DNA mismatch repair. Technology is developed for selection of MSH2 and MLH1 mutants. These studies (Example 13) are readily performed with the native yeast genes to generate valuable information. However, in order to optimize application of the results to interpretation of human clinical data, the preferred embodiment uses the hybrid human-yeast genes (Examples 2, 11) and random mutagenesis is performed on the human coding sequence of the hybrid.

[0091] A qualitative spot test has been described for identifying yeast strains with increased mutation rates (Gordenin et al., 1991), and this has been applied to identify msh2 dominant negative mutants (Drotschmann et al., 1999b). In this procedure, equivalent volumes of cells from liquid cultures of different strains are spotted onto a plate which is selective for plasmids but not selective for reporter gene mutants. After incubation at 30° C., the patches of cells are replica plated to plates which are selective for mutants in the reporter gene (e.g. FOA for the (GT)₁₆-URA3 reporter; minus lysine for lys2::InsE-A₁₄; canavanine for CAN1). The amount of growth on the second plate is proportional to the mutation frequency (or MMR defect) in the strain. This qualitative test is used as one initial screen to identify MMR mutants, which are later confirmed in quantitative fluctuation tests (Example 4), The qualitative spot test also appears capable of distinguishing mutants from both wild type and variants with reduced efficiency of MMR (Drotschmann et al., 1999b). This procedure is suitable for analyzing hundreds of different yeast clones.

[0092] Technology is developed to isolate MMR mutants from larger pools of yeast (e.g. generated from libraries of mutagenized genes; Example 13). A genetic selection scheme in yeast for msh2 dominant negative mutants was recently described (Studamire et al., 1999) which employed two screens. Yeast cells contained a vector (pK5) which promoted transcription of the E. coli LacZ gene containing an out of frame (GT)₁₄ tract. This tract is much more unstable in a msh2Δ mutant; when plated on X-gal plates, the msh2Δ mutant exhibited nearly 100% blue colonies (representing frameshifts in the (GT)₁₄ tract which restores the reading frame) while a MMR wild type strain formed less than 0.5% blue colonies. The secondary assay was a qualitative spot test (above) using the CAN1 reporter gene. The msh2Δ mutant papillates to canavanine resistance at a much higher rate (50×) which is scored visually. These investigators performed random mutagenesis on the yeast MSH2 gene (SEQ ID NO: 2), and transformed the library of expression vectors containing the mutagenized MSH2 gene into yeast. Transformants were replica plated onto X-gal plates and putative MMR mutants were identified as pale-blue to blue colonies. Clones isolated in the first screen were confirmed as mutators by qualitative spot tests for canavanine resistance. From a library of 23,000 yeast transformants, 31 independent msh2 dominant negative mutants were obtained (Studamire et al., 1999). It is probable that the actual msh2 mutant frequency in the mutagenized pool was greater, since Studamire et al. (1999) selected only for dominant negative mutants by screening in a wild type yeast host.

[0093] Selections for MMR mutants are developed. The pK5 plasmid (above) is used for colorimetric mutator assays on X-gal plates. If this plasmid is not available or unsuitable for use with our strains, then a similar out of frame GT tract is engineered into a yeast expression vector which expresses the native E. coli Lac Z gene. The secondary qualitative spot test for mutators is performed with one of our other reporter genes (Example 9). The selection schemes are tested and optimized using yeast strains YBT24 (mlh1Δ null mutant) and YBT25 (msh2Δ null mutant) each with and without a plasmid expressing a wild type complementing gene. Reconstruction experiments using cultures of the wild type plasmid complemented strain seeded with various ratios of the null mutant alone are performed to test and validate the screens. Once optimized, the two step selection scheme is used to identify genes encoding missense variants that result in reduced efficiency of MMR. For these analyses, the MLH1p R265H (SEQ ID NO: 31) variant is used since it confers a mutation frequency intermediate between wild type and null mutant (Example 5). The screens allow identification of variants with reduced MMR efficiency since each screen (blue color on X-gal, spot test for mutant papillation) is qualitative. The wild type plasmid complemented and null mutants will be used as standards in optimizing the selections. A sensitive/quantitative reporter gene (Example 9) is used for the qualitative spot tests. Additional screens and selections are also developed.

### EXAMPLE 13

### Bioinformatics Applications of the Technology

[0094] There is very good correlation between human clinical data on missense codons and the results of functional assays in yeast (Example 5, 6). Thus, results in the yeast assays appear to be predictive of protein function in humans. New minor sequence alterations in hMSH2 (SEQ ID NO: 3) and hMLH1 (SEQ ID NO: 7) are continually being identified (http://www.nfdht.nl). This invention is used to determine whether amino acid replacements in hMSH2 and hMLH1 are mutations, silent polymorphisms or variants which result in reduced efficiency of MMR. The functional significance of existing and newly discovered minor gene variants is interpreted using the data which is generated as described below. This information allows accurate interpretation of genetic test results and appropriate patient counseling. Retrospective analyses.

[0095] Missense codons reported in human genes are introduced by site directed mutagenesis into the native yeast gene or, preferably, into a hybrid gene which includes the appropriate human coding region (Example 11). The efficiency of these variant proteins is determined using the three reporter genes. For mutants or altered efficiency variants, immunoblot analyses is performed to determine whether the phenotype is due to a direct effect of the altered amino acid on DNA mismatch repair or to an altered stability of the protein. It is also determined whether hybrid human-yeast proteins with amino acid replacements that are inactivating mutations function as dominant negative mutants. Prospective analyses.

[0096] The positive selections for inactivating MMR mutations (Example 12) is utilized. For each hybrid gene, the human coding region is PCR amplified from the wild type human cDNA under conditions which increase misincorporation rates. The GeneMorph PCR Mutagenesis Kit (Stratagene) is used for this purpose. The enzyme in this system incorporates 1 to 7 base substitutions per 1000 bp, and fewer than 2% of the in vitro alterations are insertions or deletions. Thus, for a human coding region of 50 codons (150 bp), using the most error prone conditions should yield approximately one base substitution per DNA molecule. The PCR products are ligated into appropriately restricted and gel purified parental expression vector and transformed into E. coli. A library of hybrid genes (>110,000 independent clones) is transformed into the appropriate yeast strain (YBT25 for MSH2 hybrids; YBT24 for MLH1 hybrids; each with appropriate reporter genes) selecting for histidine prototrophs (marker on the expression vector; Example 1). Subsequently, the library of yeast is subjected to the two step screen for mutator phenotypes (Example 12). For each mutator identified, immunoblot analysis is performed to determine the size of the MMR protein. For yeast mutators expressing full length MMR protein, the expression vector is shuttled into E. coli by standard methods. The human coding region is subjected to DNA sequence analysis to determine the alteration which gives rise to the defect in MMR. (Note that all regions of the plasmid are derived from an expression vector that complements the null mutation with the exception of the PCR generated human coding region.) Yeast strains expressing the mutant MMR protein are also tested in quantitative MMR fluctuation tests to determine whether the protein variant is a loss of function mutant (MMR defect equivalent to the null mutant) or an MMR variant of reduced efficiency.

### EXAMPLE 14

### Construction of Additional Hybrid Human-Yeast MLH1 Genes.

[0097] Hybrid MLH1 h(77-177) (SEQ ID NO: 128) was constructed using a two-piece overlap extension. A 284-bp fragment of the human MLH1 coding region was amplified by PCR from hMLH1 cDNA clone ATCC#217884 using primers E466-2 and D650-4 (Example 2). A 1813-bp fragment of the yeast MLH1 C-terminal coding sequence and 3′ untranslated region was amplified by PCR from S. cerevisiae strain S288C genomic DNA using primers D173-5 and T941-6 (Example 2). The two fragments were diluted and combined in approximately equimolar amounts and subjected to overlap extension PCR using primers E466-2 and T941-6. All PCR amplifications were carried out using Pfu DNA polymerase (Stratagene, La Jolla) and employed conditions recommended by the manufacturer. The overlap extension PCR fragment was digested with AatII and XhoI and ligated into AatII-XhoI digested pMLH1. DNA sequencing was carried out to confirm the sequence of the hybrid gene.

[0098] A plasmid containing MLH1_h(77-177) (SEQ ID NO: 128) was introduced into YBT24;pSH91 as described in Example 3 and MMR assays were carried out as described in Example 4. The results demonstrated that the hybrid complemented the MLH1 deficiency. The mean mutation frequency of yeast strain that carried this hybrid was 5.9×10⁻⁵, a level approximately the same as observed with the hybrid MLH1_h(77-134) (SEQ ID NO: 42) and significantly less than the null mutant (1.6×10⁻³). These results indicate that the hybrid MLH1_h(77-177) (SEQ ID NO: 128) is functional in MMR and exhibits a mutation defect only 2.1-fold higher than yeast complemented with the wild-type MLH1 gene.

### EXAMPLE 15

### Construction of a Hybrid Human-Yeast MSH2 Gene.

[0099] Hybrid gene MSH2_h(621-832) (SEQ ID NO: 129) was constructed using a three-piece overlap extension PCR. A 681-bp fragment of the human MSH2 coding sequence was amplified by PCR from hMSH2 cDNA clone ATCC#788421 using primers SEQ ID NO: 130 and SEQ ID NO: 131. A 1168-bp fragment encompassing the central portion of the yeast MSH2 coding sequence was amplified from S. cerevisiae strain S288C genomic DNA using primers SEQ ID NO: 132 and SEQ ID NO: 133. A 344-bp fragment encompassing the C-terminal coding region and 3′ untranslated region of yeast MSH2 was amplified from S. cerevisiae strain S288C genomic DNA using primers SEQ ID NO: 134 and SEQ ID NO: 135. The three fragments were diluted, mixed in approximately equimolar amounts and subjected to overlap extension PCR using primers SEQ ID NO: 132 and SEQ ID NO: 135. All PCR amplifications were carried out using Pfu DNA polymerase (Stratagene, La Jolla) or PfuTurbo (Stratagene) and employed conditions recommended by the manufacturer. The overlap extension PCR fragment was digested with SphI and XhoI and ligated into SphI-XhoI digested pMETc/MSH2. DNA sequencing is carried out to confirm the sequence of the hybrid gene. Function of the hybrid protein encoded by gene in DNA mismatch repair is determined according to the method in Example 4 and compared to the mlh1 null strain and the mlh1 null strain complemented with a plasmid expressed wild type MLH1 gene.

### EXAMPLE 16

### Additional Functional Assays of Mlh1p Variants Containing Amino Acid Replacements

[0100] During the process of screening for mutations in MMR genes it is common to find missense mutations and small in-frame deletions in the coding region of MMR genes. The functional significance of these alterations in MMR is uncertain and hence these changes have been termed variants of “uncertain significance” and “questionable pathogenicity”. A current review of the MLH1 mutation databases listed in Example 1, single nucleotide polymorphism (SNP) databases and the literature (Cunningham et al., 2001; Jakubowska et al., 2001; Syngal et al., 1999; Terdiman et al., 2001) has revealed more than 80 missense alterations and in-frame deletions that could be characterized as variants of uncertain significance. Note that numbers refer to the codon position (amino acid reside) in the full-length open reading frame with position 1 being the start codon (methionine).

[0101] To determine the function of Mlh1p variants site-directed mutations were introduced into the yeast MLH1 gene as described in Example 1. Table 4 lists amino acid substitutions observed in human MMR genes and the homologous codon change introduced into the yeast orthologue. Plasmid pMLH1 was used as the template for the derivation of MLH1 variants 122F (SEQ ID NO: 48), I22T (SEQ ID NO: 49), P25L (SEQ ID NO: 50), N61S (SEQ ID NO: 51), T791 (SEQ ID NO: 52), K81E (SEQ ID NO: 53), A108V (SEQ ID NO: 54), V216L (SEQ ID NO: 55), I262-del (SEQ ID NO: 56), L666R (SEQ ID NO: 57), P667L (SEQ ID NO: 58), R672L (SEQ ID NO: 59), E676D (SEQ ID NO: 60), H733Y (SEQ ID NO: 61), L744V (SEQ ID NO: 62), K764R (SEQ ID NO: 63), and R768W (SEQ ID NO: 64). Table 4 also lists the DNA sequences and restriction site alterations introduced by the oligonucleotide used for site-directed mutagenesis of the yeast gene. The variant MLH1 genes were introduced into yeast strain YBT24;pSH91 and functionally tested in the standardized MMR assay as described in Examples 1, 4 and 5 except that total cell number was calculated using OD₅₉₅ measurements from an aliquot of the yeast culture and a conversion factor of 1.0 OD₅₉₅=1.1×10⁷ viable cells was applied. At least 3 independent mutant clones were tested for function in yeast with identical results. At least one clone was sequenced to confirm the appropriate codon change. The data presented are derived from four replicate cultures of a single mutant clone that had been confirmed by DNA sequencing. Statistical comparisons were done using unpaired, two-tailed t-tests (Excel version 95, Microsoft) and the null hypothesis was rejected for P-values≦0.05.

[0102] Five of the codon changes in MLH1 (V216L (SEQ ID NO: 55), E676D (SEQ ID NO: 68), H733Y (SEQ ID NO: 61), L744V (SEQ ID NO: 62), and K764R (SEQ ID NO: 63)) encode proteins that complemented the MLH1-deficient strain YBT24. The mean mutation frequencies as determined using the standardized MMR assay ranged from 6.9×10⁻⁶ to 2.6×10⁻⁵ (FIG. 7). A statistical analysis (t-tests) showed that these values were not significantly different from the control strain complemented with the wild-type MLH1 gene (“Complemented”, FIG. 7). The results indicate that the Mlh1p alterations V216L, E676D, H733Y, L744V, and K764R are silent polymorphisms. Pang et al. (Pang et al., 1997) previously observed that the K764R alteration in Mlh1p does not impair reversion frequency of a different reporter gene, the hom3-10 allele, in yeast.

[0103] Three of the codon changes in MLH1 (T791 (SEQ ID NO: 52), K81E (SEQ ID NO: 53) and R768W (SEQ ID NO: 64) strongly impaired MMR activity. The mean mutation frequencies ranged from 1.3×10⁻³ to 2.5×10⁻³; values that were not greatly different from the MLH1-deficient strain (“Mutator”, FIG. 7). The results indicate that the Mlh1p alterations T791, K81E and R768W confer complete or near complete loss of MMR function and thus these alterations are considered to be mutations.

[0104] Nine of the codon changes in MLH1 (122F (SEQ ID NO: 48), I22T (SEQ ID NO: 49), P25L (SEQ ID NO: 50), N61S (SEQ ID NO: 51), A108V (SEQ ID NO: 54), 1262-del (SEQ ID NO: 56), L666R (SEQ ID NO: 57), P667L (SEQ ID NO: 58), R672L (SEQ ID NO: 59) encode proteins with intermediate efficiencies of MMR. The mean mutation frequencies ranged from 3.6×10⁻⁵ to 7.8×10⁻⁴; values that were signficantly less than the MLH1-deficient strain (“Mutator”, FIG. 7) but significantly more than the MLH1p complemented strain (“Complemented”, FIG. 7). The results indicate that the Mlh1p alterations I22F, I22T, P25L, N61S, A108V, 1262-del, L666R, P667L and R672L confer partial function in MMR and thus are considered to be efficiency polymorphisms. An Mlh1 protein with the P25L alteration was previously observed to have intermediate levels of MMR activity using different reporter genes (Shcherbakova & Kunkel, 1999).

### EXAMPLE 17

### Additional Functional Assays of Msh2p Variants Containing Amino Acid Replacements

[0105] Msh2p variant R542P (SEQ ID NO: 172) was constructed using two-piece overlap extension PCR. An 874-bp upstream fragment of MSH2 was amplified from S. cerevisiae strain S288C genomic DNA using primer SEQ ID NO: 132 (Example 15) and the MSH2 R542P (SEQ ID NO: 171) antisense primer (Table 4). A 393-bp downstream fragment of MSH2 was amplified from S. cerevisiae strain S288C genomic DNA using the MSH2 R542P (SEQ ID NO: 170) sense primer (Table 4) and SEQ ID NO: 173. Both fragments were amplified with Pfu polymerase (Stratagene). The upstream and downstream fragments were diluted and mixed in approximately equimolar amounts and subjected to overlap extension PCR using Taq polymerase and primers SEQ ID NO: 132 and SEQ ID NO: 173. The overlap extension product was digested with BglII and NcoI and subcloned into BglII-NcoI digested pBluescript-yMSH2. Individual clones were identified which contained the MSH2 R542P variant and full-length BamHI-XhoI MSH2 fragments were cloned into BamHI-XhoI digested expression vector pMETc. This construct identical to the pMETc/MSH2 expression vector except that it contains the R542P alteration. The alteration and yeast sequences, including the entire BglII-NcoI fragment that was amplified by overlap extension, were confirmed by DNA sequence analysis.

[0106] The MSH2 R542P expression construct was introduced into YBT25;pSH91 as described in Example 3 and MMR assays were carried out as described in Example 4. The mutation frequency of the representative yeast strain was 1.33×10⁻⁴, a level which was intermediate between the MSH2p-deficient strain, YBT25; pSH91, pMETc (2.39×10⁻³), and the MSH2-complemented strain, YBT25; pSH91, pMETc/MSH2 (1.57×10⁻⁵). The results indicate that the Msh2p alteration R542P confers partial function in MMR and is therefore an efficiency polymorphism. The results differ from a previous report which suggested that the MSH2 R542P alteration strongly inactivated MMR (Drotschmann et al., 1999a).

### EXAMPLE 18

### Prospective Screen for MMR Gene Variants that Cause Loss of MMR Function

[0107] New methodology was developed to identify novel MMR gene variants (not previously observed) that impair MMR activity. The screen utilizes hybrid human-yeast genes to allow the identification of critical human codons within the human portion of the hybrid gene. As described in detail below the methodology incorporated (i) generation in yeast of a library of MMR gene variants, (ii) screening of the yeast library for strains deficient in MMR, (iii) identification of the causative mutation in the MMR gene and (iv) validation of the causative mutation in standardized MMR assays. The methodology has been used to identify 39 novel MLH1 amino acid replacements that impair MMR function (see Results below).

[0108] Method (i): The generation in yeast of a library of MMR gene variants. In vivo gap repair cloning in yeast (Ishioka et al., 1993; Scharer & Iggo, 1992) was used to create a library of yeast strains that contain nucleotide alterations in a portion of hybrid human-yeast MLH1 genes. The gap repair assay in yeast is a highly effective technique to clone DNA fragments and is based on efficient homologous recombination mechanisms in yeast when the introduced DNAs contain regions of overlapping homology. The vector for in vivo gap repair was ClaI-AatII digested pMLH1, which deletes codons 38-83 of yeast MLH1. The mutant 401-bp fragments used for gap repair were generated by error-prone PCR using XhoI-linearized pMLH1_h(41-86) as a template for amplification. The upstream and downstream primers used for amplification of the MLH1 fragment were SEQ ID NO: 174 and SEQ ID NO: 175, respectively. In preliminary experiments the upstream primer SEQ ID NO: 176 was used to produce a fragment of 475-bp. Several different PCR conditions were used to generate mutant MLH1 gene fragments. PCR mixes utilized either Taq DNA polymerase (Promega) or Mutazyme DNA polymerase (Stratagene) and the reaction buffer, nucleotides, primers and enzyme concentrations recommended by the manufacturer. Conditions of high and low fidelity were manipulated by varying the MgCl₂ concentration (1.5-2.5 mM) in reactions employing Taq DNA polymerase and the amount of input DNA (3-74 ng) in reactions employing Mutazyme polymerase. The protocol for PCR temperature cycling was as follows: 94° C. for 2 min; 33 cycles of 94° C. for 36 sec, 55° C. for 1 min, 72° C. for 2 min; and 72° C. for 10 min. The resulting PCR fragments were purified with Wizard PCR preps (Promega).

[0109] For gap repair in yeast approximately 0.5 μg purified PCR product was combined with 0.4 μg gapped vector DNA and introduced into yeast strain YBT24; pSH91 by lithium acetate-polyethelene glycol transformation as described in Example 3. Yeast cells in which fragment and vector recombined to produce a circular replicating plasmid were converted to histidine prototrophy due to to presense of the HIS3 marker gene present on the pMLH1 vector and were selected by growth on SD plates supplemented with adenine and lysine. Typically 300-700 colonies were obtained on these plates while plates that received yeast cells transformed with vector or fragment alone exhibited very few (<5) colonies. The individual colonies that grew as a result of the in vivo gap repair technique are expected to contain products of the homologous recombination between genetically distinct mutant MLH1 gene fragments and the gapped vector DNA and therefore constitute a library of hybrid human-yeast MLH1 genes.

[0110] In addition to the generation of libraries derived from the hybrid MLH1_h(41-86) (SEQ ID NO: 41), libraries derived from the hybrid MLH1 h(77-134) (SEQ ID NO: 42) have been generated by gap repair cloning in yeast. The same methodology as described above was used except that XhoI-linearized pMLH1_h(77-134) was used as the template for PCR. Identical PCR conditions were employed and transformation of yeast utilized the same ClaI-AaII digested pMLH1 vector DNA.

[0111] Method (ii): Screening of the yeast library for strains deficient in MMR. The proficiency of MMR of individual yeast clones from the gap repair transformation was determined using a series of qualitative MMR assays which measure genetic instability of reporter genes. The first screen, based on the in vivo MMR assay described in Example 4, was adapted for high through-put using small culture volumes and a qualititive spot test as follows: Individual yeast clones were grown overnight in glass test tubes at 30° C. in 3 ml SD medium supplemented with adenine and lysine with vigorous shaking (Day 1 culture). The next day 120 μl was subinoculated into 3 ml SD medium supplemented with adenine, lysine and uracil and again grown overnight (Day 2 culture). The next day 4 μl of the saturated Day 2 culture was spotted in duplicate on SD plates supplemented with adenine, lysine, uracil and containing 1 mg/ml FOA. The plates were incubated at 30° C. for two to three days and then scored by counting the number of FOA-resistant colonies on each spot. Strains that exhibited few colonies (typically <15) were scored as having low levels of genetic instability (i.e. normal in MMR) and were discarded. Strains that exhibited many colonies (typically >15) were scored as having high levels of genetic instability (i.e. deficient in MMR) and were selected for further analysis. These strains were arrayed on a master plate by applying 25 μl of the Day 1 cultures to SD plates supplemented with adenine and lysine and grown for two days. The secondary screen used to examine the proficiency of MMR was based on spontaneous mutation of the CAN1 gene as described in Example 9. A loopful of each each strain was taken from the master plate and patched onto SD plates supplemented with adenine, lysine and containing 60 μg/ml canavanine. Plates were incubated three to four days at 30° C. and scored by counting the number of canavanine-resistant colonies that grew. Strains that exhibited few colonies (typically<15) were scored as having low levels of genetic instability (i.e. normal in MMR) and were discarded. Strains that exhibited many colonies (typically>15) were scored as having high levels of genetic instability (i.e. deficient in MMR). These clones, which exhibited high levels of genetic instability in both screens, were selected for further analysis.

[0112] Method (iii): Identification of the causitive mutation in the MMR gene. Total yeast DNA was prepared from yeast clones of interest using the glass-bead method (Hoffman & Winston, 1987) modified as follows: Yeast clones were grown to saturation in 20 ml SD medium supplemented with adenine and lysine. Yeast cells from a 7 ml aliquot of this culture were collected by centrifugation (2500 rpm, 10 min), washed in H₂O, transferred to an eppendorf tube, centrifuged (10,000 rpm, 5 see) and resuspended in 200 μl cell lysis buffer containing 0.1 M NaCl, 10 mM Tris-HCl, 1 mM EDTA, 2% (vol/vol) Triton X-100, 1% (wt/vol) SDS and 10 μg/ml RNase A (Qiagen). To disrupt the cells an equal volume of acid-washed glass beads (#G-8772, Sigma) was added and the samples were vortexed for 3 min. Samples were incubated 10 min at room temperature, phenol-chloroform extracted, precipitated in ethanol and the resulting DNA preparation was resuspended in 50 μl H₂O. Before transformation of bacteria with the DNA preparation, a 15 μl aliqout of each sample was digested with BamHI, which restricts only the reporter plasmid pSH91, and thus creates a strong bias toward transformation with the mutant MLH1 plasmids. Three microliters of the BamHI-digested DNA was introduced into E. coli strain DH5α by electroporation using an electroporator (BTX model #ECM399, Gentronix, Inc.) and following the manufactorures instructions. Colonies containing the mutant MLH1 plamids were selected by growth on LB plates containing 50 μg/ml ampicillin. Plasmid DNA was purified using the Wizard Plus SV Minipreps kit (Promega) and sequenced as described in Example 1 over the portion of the MLH1 gene corresponding to the entire mutagenized PCR fragment. Sequencing was carried out in both the forward and reverse direction using primers SEQ ID NO: 177 and SEQ ID NO: 175 (above), respectively.

[0113] Method (iv): Validation of the causative mutation in standardized MMR assays. Mutant MLH1 plasmids were selected for further study if they were found to contain a single codon change in the MLH1 gene, since it appeared that the codon change in each plasmid was responsible for the impaired MMR phenotype. However it was also formally possible that the mutator phenotype might also have been a result of spontaneous mutations in the reporter gene and/or other endogenous genes in that particular yeast clone. To determine capability for MMR of the gene encoded by the isolated plasmid, the recovered plasmids were reintroduced into yeast strain YBT24;pSH91 by transformation as described in Example 3. Colonies were selected by growth on SD plates containing adenine and lysine and two transformants with each revovered plasmid were tested in quantitative in vivo MMR assays as described in Example 4. Strains that exhibited a high mutation frequency as compared to the appropriate control strain [YBT24;pSH91, pMLH1_h(41-86) or YBT24;pSH91, pMLH1_h(77-134)] were scored as containing plasmids with a codon change that impaired MMR. It should be noted that the mutant and control strains were genetically identical except for the single codon change present in the MLH1 gene.

[0114] Results: Approximately 600 transformants [200 MLH1_h(41-86) and 400 MLH1_h(77-134)] were functionally screened following the gap repair cloning method in yeast. Aproximately 130 (22%) of these exhibited a strong mutator phenotype when analyzed by Method (ii), and were sequenced to determine the genetic alteration in the MLH1 gene. A variety of alterations were observed including nucleotide insertions, deletions, nonsense and missense mutations. The ratio and spectra of the mutations was very similar to those previously reported for Taq and Mutazyme DNA polymerase (Stratagene GeneMorph PCR mutagenesis kit product literature and references therein). Forty-eight (37%) of the mutant MLH1 molecules contained a single missense alteration and 39 of these were novel alterations that impaired MMR activity when validated by Method (iv) [The remainder either were duplicate alterations (n=6) or exhibited substantial MMR activity when reintroduced into yeast (n=3)]. The 39 novel MMR gene inactivating alterations have been listed in Table 5. Of note is the fact that 3 alterations are identical to changes previously observed in HNPCC patients (hMLH1 G67E, C77R and K84E) and 4 alterations occur at the same codon where different substitutions were previously reported in HNPCC (hMLH1 S44V, G67V, C77G, K84R).

### Example 19

### Functional Analysis of MLH1 Proteins having Missense Alterations at Human Codon S44.

[0115] To determine how phenotypic variability relates to genetic variablity at a single amino acid a spectrum of codon alterations were created in the human-yeast hybrid MLH1_h(41-86) (SEQ ID NO: 41) at the amino acid residue corresponding to human codon 44 (S44). An oligonucleotide pool with the sequence SEQ ID NO: 178, where “N” represents any of the four nucleotides A, C, G or T, was synthesized by and purchased from Bio-Synthesis Inc. (Lewisville, TX). Ideally, the random incorporation of nucleotides at this triplet, creates a collection of oligonucleotides containing all 64 possible codon (encoding all 20 possible amino acids plus 3 termination codons) alterations at this position. Oligonucleotide pool SEQ ID NO: 178, in combination with SEQ ID NO: 114 (Example 2), was then used to amplify a portion of the hMLH1 gene using hMLH1 cDNA clone ATCC#217884 as a template. Amplification utilized Pfu DNA polymerase (Stratagene) according to the manufacturer's instructions and cycling conditions were as follows: 94° C. for 2 min; 30 cycles of 94° C. for 36 sec, 55° C. for 1 min, 72° C. for 2 min 30 sec; and 72° C. for 10 min. The resulting 125-bp fragment was digested with C/al and AatII and ligated into pMLH1 replacing a portion of the native MLH1 gene (SEQ ID NO: 1). Cloning generates a pool of molecules identical to pMLH1_h(41-86) (see Example 2) except for the randomized codon at hMLH1 codon 44. Transformation into E. coli DH5α generated a collection of colonies that each contain a unique pMLH1_h(41-86) molecule. Plasmid DNA from individual colonies was purified using Wizard Plus SV Minpreps (Promega) and then analyzed by DNA sequencing (Example 1) to confirm the sequence of the amplified region and, importantly, to determine the codon present at hMLH1position 44. Plasmids that contained a novel change at position 44 were transformed into YB24;pSH91 (Example 3) and two independent colonies from each yeast transformation were tested using the standardized quantitative MMR assay (Example 4).

[0116] Codons corresponding to 14 of the 20 possible amino acids have been identified and functionally characterized. One alteration was a silent change (S44S) (SEQ ID NO: 179), one alteration (S44A) (SEQ ID NO: 180) encoded a protein with wild-type levels of MMR activity and 12 alterations confered complete loss of MMR function. As detailed in Table 6, serine (S) and alanine (A) at amino acid 44 of hMLH1p resulted in proteins with normal MMR activity, and the substitutions arginine (R) (SEQ ID NO: 181), cysteine (C) (SEQ ID NO: 182), glutamine (O) (SEQ ID NO: 183), histidine (H) (SEQ ID NO: 184), isoleucine (I) (SEQ ID NO: 185), leucine (L) (SEQ ID NO: 186), phenylalanine (F) (SEQ ID NO: 187), proline (P) (SEQ ID NO: 188), threonine (T) (SEQ ID NO: 189), tryptophan (W) (SEQ ID NO: 190), tyrosine (Y) (SEQ ID NO: 191), and valine (V) (SEQ ID NO: 192) resulted in proteins with impaired MMR activity. In confirmation of these findings it should be noted that alanine (A) is the normal amino acid at the corresponding position in the yeast protein (MLH1p) and an alanine (A) to serine (S) alteration in MLH1p was previously shown to results in a protein with normal MMR activity (Example 5). Furthermore, a serine (S) to phenylalanine (F) alteration has been reported in families with HNPCC (Bronner et al., 1994; Hackman et al., 1997; Tannergard et al., 1995), and the introduction of phenylalanine (F) at the corresponding position in yeast MLH1p (S41 F) abolished MMR activity (Example 5 and (Pang et al., 1997)). The results indicate that the majority of missense alterations at hMLH1 codon 44 impair MMR activity. In addition to showing functional variability due to changes at a single codon, the results of these experiments provide additional prospective information about missense alterations that impair MMR and thus, may have a role in the development of human cancers.

TABLE 1
Human MLHJ and MSH2 variants examined in this study and oligonucleotides used for
making site-directed mutations

| | | Equivalent | | | | Restriction |
|---|---|---|---|---|---|---|
| Variation in | | substitution | Oligonucleotide sequence^{a} and SEQ ID# | | | site |
| human MMR gene | | in yeast | [(S), sense and (A), anti-sense strand] | | | alteration^{b} |
| MLHI | S44F | A41F | 5′-CCATCGATGCGAACTTTACAATGATTGATATTC-3′ | (S) | (SEQ ID 69) | −BsaMI |
| | | | 5′-GAATATCAATCATTGTAAAGTTCGCATCGATGG-′3 | (A) | (SEQ ID 70) | |
| | — | A41S | 5′-CCATCGATGCGAATTCTACAATGATTGATATTC-3′ | (S) | (SEQ ID 71) | +EcoRI |
| | | | 5′-GAATATCAATCATTGTAGAATTCGCATCGATGG-′3 | (A) | (SEQ ID 72) | |
| | Q62K | — | 5′-GAAGTTGATTCAGATTAAAGACAATGGCACCG-3′ | (S) | (SEQ ID 73) | −BstXI |
| | | | 5′-CGGTGCCATTGTCTTTAATCTGAATCAACTTC-′3 | (A) | (SEQ ID 74) | |
| | G67R | G64R | 5′-GATAACGGATCGCGAATTAATAAAGCAGACCTGCC-3′ | (S) | (SEQ ID 75) | +NruI |
| | | | 5′-GGCAGGTCTGCTTTATTAATTCGCGATCCGTTATC-′3 | (A) | (SEQ ID 76) | |
| | 168N | 165N | 5′-GATAACGGATCTGGAAATAATAAAGCAGAC-3′ | (S) | (SEQ ID 77) | −VspI |
| | | | 5′-GTCTGCTTTATTATTTCCAGATCCGTTATC-′3 | (A) | (SEQ ID 78) | |
| | R69K | — | 5′-CAATGGCACCGGTATCAAGAAAGAAGATCTGG-3′ | (S) | (SEQ ID 79) | +AgeI |
| | | | 5′-CCAGATCTTCTTTCTTGATACCGGTGCCATTG-′3 | (A) | (SEQ ID 80) | |
| | S93G | — | 5′-CTTTGAGGATTTAGCCGGTATTTCTACCTATG-3′ | (S) | (SEQ ID 81) | +BsrFI |
| | | | 5′-CATAGGTAGAAATACCGGCTAAATCCTCAAAG-′3 | (A) | (SEQ ID 82) | |
| | E102K | E99K | 5′-GGATTCCGAGGAAAGGCTTTAGCCAGTATCTC-3′ | (S) | (SEQ ID 83) | −HindIII |
| | | | 5′-GAGATACTGGCTAAAGCCTTTCCTCGGAATCC-′3 | (A) | (SEQ ID 84) | |
| | I107R | I104R | 5′-GAAGCTTTAGCAAGTAGATCTCATGTGGCAAGAG-3′ | (S) | (SEQ ID 85) | +BglII |
| | | | 5′-GAAGCTTTAGCAAGTAGATCTCATGTGGCAAGAG-′3 | (A) | (SEQ ID 86) | |
| | T117R | T114R | 5′-GAGTCACAGTAACGCGTAAAGTTAAAGAAGAC-3′ | (S) | (SEQ ID 87) | +MlnI |
| | | | 5′-GTCTTCTTTAACTTTACGCGTTACTGTGACTC-′3 | (A) | (SEQ ID 88) | |
| | R217C | R214C | 5′-CCAGGATAGGATTTGTACAGTGTTCAATAAATC-3′ | (S) | (SEQ ID 89) | +BsrGI |
| | | | 5′-GATTTATTGAACACTGTACAAATCCTATCCTGG-′3 | (A) | (SEQ ID 90) | |
| | V219I | V216I | 5′-GATAGGATTAGGACAATATTCAATAAATCTGTG-3′ | (S) | (SEQ ID 91) | +SspI |
| | | | 5′-CACAGATTTATTGAATATTGTCCTAATCCTATC-′3 | (A) | (SEQ ID 92) | |
| | R265C | R265C | 5′-TTTTTTTCATTAATAATTGTCTAGTGACATGTG-3′ | (S) | (SEQ ID 93) | −SpeI |
| | | | 5′-CACATGTCACTAGACAATTATTAATGAAAAAAA-′3 | (A) | (SEQ ID 94) | |
| | R265H | R265H | 5′-TTTTTTTCATTAATAATCACCTAGTGACATGTG-3′ | (S) | (SEQ ID 95) | −SpeI |
| | | | 5′-CACATGTCACTAGGTGATTATTAATGAAAAAAA-′3 | (A) | (SEQ ID 96) | |
| | V326A | I326A | 5′-GAGATCATAGAGAAAGCGGCCAATCAATTGC-3′ | (S) | (SEQ ID 97) | +EaeI |
| | | | 5′-GCAATTGATTGGCCGCTTTCTCTATGATCTC-′3 | (A) | (SEQ ID 98) | |
| | — | I326V | 5′-GAGATCATAGAGAAAGTCGCGAATCAATTGC-3′ | (S) | (SEQ ID 99) | +NruI |
| | | | 5′-GCAATTGATTCGCGACTTTCTCTATGATCTC-′3 | (A) | (SEQ ID 100) | |
| | Q542L | Q552L | 5′-GATTAGCCGCTATTCTTCATGACTTAAAGC-3′ | (S) | (SEQ ID 101) | +BspHI |
| | | | 5′-GCTTTAAGTCATGAAGAATAGCGGCTAATC-′3 | (A) | (SEQ ID 102) | |
| | R659P | R672P | 5′-CCATTTTTTATATATCCCTTAGGTAAAGAAGTTG-3′ | (S) | (SEQ ID 103) | +Bsu36I |
| | | | 5′-CAACTTCTTTACCTAAGGGATATATAAAAAATGG-′3 | (A) | (SEQ ID 104) | |
| | A681T | A694T | 5′-GTATTTTAAGAGAGATTACATTGCTCTATATACCTG-3′ | (S) | (SEQ ID 105) | +BsrDI |
| | | | 5′-CAGGTATATAGAGCAATGTAATCTCTCTTAAAATAC-′3 | (A) | (SEQ ID 106) | |
| MSH2 | G322D | G317D | 5′-CAAAATCCATTCGATAGCAACAATTTAGC-3′ | (S) | (SEQ ID 107) | None^{c} |
| | | | 5′-GCTAAATTGTTGCTATCGAATGGATTTTG-′3 | (A) | (SEQ ID 108) | |

^{a}Both sense and antisense oligonucleotides were employed for site-directed mutations in yeast and human MMR genes as described in the Materials and Methods section.
^{b}Restriction site alterations are silent, except for the indicated amino acid substitutions. +, restriction site additon; −, restriction site loss.
^{c}Alteration screened by DNA sequencing.

[0117] TABLE 2
Comparison of functional and clinical data concerning MMR gene variants

| Variation | | Equivalent | Patient satisfies | Mutation | | |
|---|---|---|---|---|---|---|
| human MMR | | subsitution | ICG-criteria^{a} | segregates | Functional classification^{a} | |
| gene | | in yeast | for HNPCC | with disease | (Results) | Other functional data |
| MLH1 | S44F | A41F | Yes | Yes | Mutant | Mutant (Pang et al., 1997) |
| | — | A41S | — | — | Polymorphism | Polymorphism (Pang et al., 1997) |
| | Q62K | — | Yes | ? | Δ Efficiency | — |
| | G67R | G64R | Yes | No | Mutant | Mutant (Pang et al., 1997) |
| | I68N | I65N | Yes | ? | Mutant | Mutant (Pang et al., 1997) |
| | R69K | — | No | ? | Δ Efficiency | — |
| | S93G | — | No | ? | Polymorphism | — |
| | E102K | E99K | ? | ? | Mutant | — |
| | I107R | I104R | Yes | ? | Mutant | — |
| | T117R | T114R | Yes | No | Mutant | Mutant (Pang et al., 1997) |
| | R217C | R214C | No | ? | Δ Efficiency | — |
| | I219V | V216I | No | No | Polymorphism | — |
| | R265C | R265C | ? | ? | Δ Efficiency | — |
| | R265H | R265H | Yes | Yes | Δ Efficiency | — |
| | V326A | I326A | Yes | No | Δ Efficiency | — |
| | — | I326V | ? | ? | Polymorphism | — |
| | Q542L | Q552L | Yes | No | Mutant | — |
| | R659P | R672P | Yes | No | Mutant | — |
| | A681T | A694T | Yes | Yes | Polymorphism | — |
| MSH2 | G322D | G317D | Yes/No | ? | Δ Efficiency | Δ Efficiency (Drotschmann et al., 1999a) |
| | P622L | P640L | Yes | Yes | Mutant | Mutant (Drotschmann et al., 1999a) |
| | H639Y | H658Y | No | No | Polymorphism | — |
| ^{a}Classification: Mutant, indicates the gene conferred a mutation frequency that was not significantly different from the chromosomal null mutant lacking a complementing plasmid; Polymorphism, indicates the gene conferred a mutant frequency that was not different from the the null mutant strain that was complemented with the wild-type yeast gene; Δ Efficiency, indicates the gene confered a mutant frequency that is intermediate between the null mutant and the | | | | | | |
| # null mutant complemented with the wild-type yeast gene. | | | | | | |

? Indicates no information available.

[0118] TABLE 3

| | Mismatch | | MMR | |
|---|---|---|---|---|
| Reporter gene | repaired | Selection | defect | Reference |
| (GT)₁₆-URA3 | (GT)ₙ | ura⁻, FOA^{R} | 150 | Example 4 |
| | Insert/De- | | | |
| | lete loop | | | |
| hom3-10 | −1 frame- | THR⁺ | 500-750 | (Marischky et al., |
| | shift in | | | 1996) |
| | (T)₆ | | | |
| lys2::InsE-A₁₄ | −1 frame- | LYS⁺ | 10,000 | (Tran et al., 1997) |
| | shift in | | | |
| | (A)₁₄ | | | |
| lys2-ΔBgl | −1 frame- | LYS⁺ | 200-250 | (Greene & Jinks- |
| | shift near | | | Robertson, 1997) |
| | 683 | | | |
| lys2-ΔA746 | +1 frame- | LYS⁺ | 225-500 | (Harfe & Jinks- |
| | shift near | | | Roberstson, 1999) |
| | 746 | | | |
| his7-2 | +1, −2 | HIS⁺ | 85 | (Shcherbakova & |
| | frameshift | | | Kunkel, 1999) |
| | in (A)₇ | | | |
| CAN1 | wide | Canavanine^{R} | 25 | (Marischky et al., |
| | variety | | | 1996) |

[0119] TABLE 4
Additional human MLH1 and MSH2 variants examined and oligonucleotides used for making site-directed
mutations

| Variation | | Equivalent | | | | Restriction |
|---|---|---|---|---|---|---|
| in human | | substitution | Oligonucleotide sequence^{a} and SEQ ID# | | | site |
| MMR gene | | in yeast | [(S), sense and (A), anti-sense strand] | | | alteration^{b} |
| MLHI | I25F | I22F | 5′-GCTGCAGGTGAGATCTTTATATCCCCCGTAAATG-3′ | (S) | (SEQ ID 136) | +BgIlI |
| | | | 5′-CATTTACGGGGGATATAAAGATCTCACCTGCAGC-′3 | (A) | (SEQ ID 137) | |
| | I25T | I22T | 5′-GCTGCAGGTGAGATCACGATATCCCCCGTAAATG-3′ | (S) | (SEQ ID 138) | −EcoRV |
| | | | 5′-CATTTACGGGGGATATCGTGATCTCACCTGCAGC-′3 | (A) | (SEQ ID 139) | |
| | P28L | P25L | 5′-GGTGAGATCATAATATCACTAGTAAATGCTCTC-3′ | (S) | (SEQ ID 140) | +SpeI |
| | | | 5′-GAGAGCATTTACTAGTGATATTATGATCTCACC-′3 | (A) | (SEQ ID 141) | |
| | N64S | N61S | 5′-CAAATAACAGATAGTGGATCTGGAATTAATAAAG-3′ | (S) | (SEQ ID 142) | None^{c} |
| | | | 5′-CTTTATTAATTCCAGATCCACTATCTGTTATTTG-′3 | (A) | (SEQ ID 143) | |
| | I82I | T79I | 5′-GTGAGCGATTCACGATATCCAAATTACAAAAATTCG-3′ | (S) | (SEQ ID 144) | +EcoRV |
| | | | 5′-CGAATTTTTGTAATTTGGATATCGTGAATCGCTCAC-′3 | (A) | (SEQ ID 145) | |
| | K84E | K81E | 5′-GAGCGATTCACGACTTCCGAGTTACAAAAATTCGAAG-3′ | (S) | (SEQ ID 146) | −AatII |
| | | | 5′-CTTCGAATTTTTGTAACTCGGAAGTCGTGAATCGCTC-′3 | (A) | (SEQ ID 147) | |
| | A111V | A108V | 5′-GTATCTCACATGTGGTACGCGTCACAGTAACGAC-3′ | (S) | (SEQ ID 148) | +MluI |
| | | | 5′-GTCGTTACTGTGACGCGTACCACATGTGAGATAC-′3 | (A) | (SEQ ID 149) | |
| | V219L | V216L | 5′-GATAGGATTCGAACTCTGTTCAATAAATCTGTG-3′ | (S) | (SEQ ID 150) | +BstBI |
| | | | 5′-CACAGATTTATTGAACAGAGTTCGAATCCTATC-′3 | (A) | (SEQ ID 151) | |
| | 1262-del | 1262-del | 5′-CCATTTCATTAATTTTTTTCAATAATAGGCTAGTGAC-3′ | (S) | (SEQ ID 152) | −SpeI |
| | | | 5′-GTCACTAGCCTATTATTGAAAAAAATTAATGAAATGG-′3 | (A) | (SEQ ID 153) | |
| | L653R | L666R | 5′-CCATCTCTGGTCAAGCGGCCATTTTTTATATATCGCC-3′ | (S) | (SEQ ID 154) | +EaeI |
| | | | 5′-GGCGATATATAAAAAATGGCCGCTTGACCAGAGATGG-′3 | (A) | (SEQ ID 155) | |
| | P654L | P667L | 5′-CTCTGGTCAAGCTTCTATTTTTTATATATCGCCTG-3′ | (S) | (SEQ ID 156) | +HindIII |
| | | | 5′-CAGGCGATATATAAAAAATAGAAGCTTGACCAGAG-′3 | (A) | (SEQ ID 157) | |
| | R659L | R672L | 5′-CCATTTTTTATATATCTCCTAGGTAAAGAAGTTG-3′ | (S) | (SEQ ID 158) | +AvrII |
| | | | 5′-CAACTTCTTTACCTAGGAGATATATAAAAAATGG-′3 | (A) | (SEQ ID 159) | |
| | E663D | E676D | 5′-CCTGGGTAAAGACGTCGATTGGGAGGATGAAC-3′ | (S) | (SEQ ID 160) | +AatII |
| | | | 5′-GTTCATCCTCCCAATCGACGTCTTTACCCAGG-′3 | (A) | (SEQ ID 161) | |
| | H718Y | H733Y | 5′-TATCCTCATTACTAGAATACGTCCTCTTCCCTTG-3′ | (S) | (SEQ ID 162) | −XmnI |
| | | | 5′-AAGGGAAGAGGACGTATTCTAGTAATGAGGATA-′3 | (A) | (SEQ ID 163) | |
| | L729V | L744V | 5′-GTATCAAACGAAGGTTCGTGGCCCCTAGACAC-3′ | (S) | (SEQ ID 164) | None^{c} |
| | | | 5′-GTGTCTAGGGGCCACGAACCTTCGTTTGATAC-′3 | (A) | (SEQ ID 165) | |
| | K751R | K764R | 5′-CCACCTTCCGGATCTATACAGAGTTTTTGAGAG-3′ | (S) | (SEQ ID 166) | −BgIII |
| | | | 5′-CTCTCAAAAACTCTGTATAGATCCGGAAGGTGG-′3 | (A) | (SEQ ID 167) | |
| | R755W | R768W | 5′-CAAAGTTTTTGAGTGGTGTAAACT-3′ | (S) | (SEQ ID 168) | None^{c} |
| | | | 5′-AGTTTACACCACTCAAAAACTTTG-′3 | (A) | (SEQ ID 169) | |
| MSH2 | R524P | R542P^{d} | 5′-ATGGTTGGTGCATGCCGTTGACACGTAATGAC-3′ | (S) | (SEQ ID 170) | +SphI |
| | | | 5′-GTCATTACGTGTCAACGGCATGCACCAACCAT-′3 | (A) | (SEQ ID 171) | |

^{a}Sense and antisense oligonucleotides were employed for site-directed mutations in yeast MMR genes as described in Example 1.
^{b}Restriction site alterations are silent, except for the indicated amino acid substitutions. +, restriction site additon; −, restriction site loss.
^{c}Alteration screened by DNA sequencing.
^{d}Alteration made by overlap extension PCR as described in Example 17.

[0120] TABLE 5
MLH1 missense changes that impair function from prospective mutational analysis

| | | | Corresponding | |
|---|---|---|---|---|
| Amino acid | | | human alteration | |
| position | Variant Isolated^{a} | | (if yeast portion | |
| in hMLH 1 | and SEQ ID # | | of hybrid) | Association with cancer |
| 11 | yL8H | (SEQ ID 193) | L11H | |
| 19 | yI16F | (SEQ ID 194) | I19F | |
| 33 | yK30N | (SEQ ID 195) | K33N | |
| 38 | yN35D | (SEQ ID 196) | N38D | |
| 38 | yN35S | (SEQ ID 197) | N385 | |
| 40 | yI37T | (SEQ ID 198) | L40T | |
| 41 | hD41G | (SEQ ID 199) | — | |
| 44 | yA41V | (SEQ ID 200) | S44V | Alteration at same aa as in HNPCC patient |
| 45 | yT42I | (SEQ ID 201) | T451 | |
| 49 | hV49A | (SEQ ID 202) | — | |
| 52 | hK52I | (SEQ ID 203) | — | |
| 52 | yK49E | (SEQ ID 204) | K52E | |
| 53 | hE53V | (SEQ ID 205) | — | |
| 54 | hG54R | (SEQ ID 206) | — | |
| 55 | yG52R | (SEQ ID 207) | G55R | |
| 55 | hG55D | (SEQ ID 208) | — | |
| 57 | hK57E | (SEQ ID 209) | — | |
| 60 | hQ60P | (SEQ ID 210) | — | |
| 61 | yI58K | (SEQ ID 211) | I61K | |
| 65 | yG62R | (SEQ ID 212) | G65R | |
| 67 | hG67V | (SEQ ID 213) | — | Alteration at same aa as in HNPCC patient |
| 67 | hG67E | (SEQ ID 214) | — | Identical to alteration in HNPCC patient |
| 72 | hD72V | (SEQ ID 215) | — | |
| 73 | hL73Q | (SEQ ID 216) | — | |
| 77 | hC77R | (SEQ ID 217) | — | Identical to alteration in HNPCC patient |
| 77 | hC77G | (SEQ ID 218) | — | Alteration at same aa as in HNPCC patient |
| 78 | hE78V | (SEQ ID 219) | — | |
| 80 | hF80L | (SEQ ID 220) | — | |
| 81 | hT81M | (SEQ ID 221) | — | |
| 84 | hK84R | (SEQ ID 222) | — | Alteration at same aa as in HNPCC patient |
| 84 | hK84E | (SEQ ID 223) | — | Identical to alteration in HNPCC patient |
| 85 | hL85S | (SEQ ID 224) | — | |
| 103 | hA103P | (SEQ ID 225) | — | |
| 116 | hT116S | (SEQ ID 226) | — | |
| 118 | hK118I | (SEQ ID 227) | — | |
| 133 | hG133E | (SEQ ID 228) | — | |
| 139 | yP136H | (SEQ ID 229) | P139H | |
| 143 | yA140V | (SEQ ID 230) | A143V | |
| 147 | yG144S | (SEQ ID 231) | G147S | |

^{a}Amino acids are abbreviated by single letter code. Numbering corresponds to the position in the native y, yeast or h, human MLH1 protein.

[0121] TABLE 6
Functional consequence of missense alterations at
hMLH1 codon 44 (S44)

| Consequence for | | |
|---|---|---|
| function in MMR | Amino acid alteration | |
| No loss of function | S44S | (SEQ ID NO: 179) |
| (Polymorphism) | S44A | (SEQ ID NO: 180) |
| Loss of function | S44R | (SEQ ID NO: 181) |
| (Mutation) | S44C | (SEQ ID NO: 182) |
| | S44Q | (SEQ ID NO: 183) |
| | S44H | (SEQ ID NO: 184) |
| | S44I | (SEQ ID NO: 185) |
| | S44L | (SEQ ID NO: 186) |
| | S44F | (SEQ ID NO: 187) |
| | S44P | (SEQ ID NO: 188) |
| | S44T | (SEQ ID NO: 189) |
| | S44W | (SEQ ID NO: 190) |
| | S44Y | (SEQ ID NO: 191) |
| | S44V | (SEQ ID NO: 192) |

Saturation mutagenesis at hMLH1 codon 44 was described in Example 19.
Codon changes corresponding to hMLH1 S44M, S44N, S44K, S44D, S44E, and S44G are tested in vivo according to Examples 1 and 5.

[0122] Abbreviations:

[0123] CRC: colorectal cancer

[0124] HNPCC: hereditary nonpolyposis colorectal cancer

[0125] MMR: DNA mismatch repair

[0126] PCR: polymerase chain reaction

[0127] NY: a codon at position N in a gene (N denoting the number of the codon, where the ATG translation initiation codon is assigned number 1) which encodes the amino acid X (encoding one of the twenty amino acids, the symbols for which are listed below).

[0128] XNY: a codon at position N in a gene (N denoting the number of the codon, where the ATG translation initiation codon is assigned number 1) in which the codon for amino acid X (encoding one of the twenty amino acids, the symbols for which is below) has been changed to codon Y (again represented by one of the twenty symbols below).

[0129] A: the amino acid alanine

[0130] C: the amino acid cysteine

[0131] D: the amino acid aspartic acid

[0132] E: the amino acid glutamic acid

[0133] F: the amino acid phenylalanine

[0134] G: the amino acid glycine

[0135] H: the amino acid histidine

[0136] I: the amino acid isoleucine

[0137] K: the amino acid lysine

[0138] L: the amino acid leucine

[0139] M: the amino acid methionine

[0140] N: the amino acid asparagine

[0141] P: the amino acid proline

[0142] Q: the amino acid glutamine

[0143] R: the amino acid arginine

[0144] S: the amino acid serine

[0145] T: the amino acid threonine

[0146] V: the amino acid valine

[0147] W: the amino acid tryptophan

[0148] Y: the amino acid tyrosine

### REFERENCES

[0149] Altschul, S. F., Madden, T. L., Schaffer, A. A., Zhang, J., Zhang, Z., Miller, W. & Lipman, D. J. (1997). Gapped BLAST and PSI-BLAST: a new generation of protein database search programs. Nucleic Acids Res. 25, 3389-3402.

[0150] Ban, C. & Yang, W. (1998). Crystal Structure and ATPase Activity of MutL: Implications for DNA Repair and Mutagenesis. Cell 95, 541-552.

[0151] Bitter, G. A. (1998). Function of hybrid human-yeast cyclin dependent kinases in Saccharomyces cerevisiae. Mol. and Gen. Genet. 260, 120-130.

[0152] Boeke, J. D., Lacroute, F. & Fink, G. (1984). A positive selection for mutants lacking orotidine-5′-phosphate decarboxylase activity in yeast: 5-fluoro-orotic acid resistance. Mol. Gen. Genet. 197, 345-346.

[0153] Borreson, A. L., Lothe, R. A., Meling, G. I., Lystad, S., Morrison, P., Lipford, J., Kane, M. F., Rognum, T. O. & Kolodner, R. D. (1995). Somatic mutations in the hMSH2 gene in microsatellite unstable colorectal carcinomas. Hum. Mol. Genet. 4(11), 2065-2072.

[0154] Bronner, C. E., Baker, S. M., Morrison, P. T., Warren, G., Smith, L. G., Lescoe, M. K., Kane, M., Earabino, C., Lipford, J., Lindblom, A., Tannergard, P., Bollag, R. J., Godwin, A. R., Ward, D. C., Nordenskjold, M., Fishel, R., Kolodner, R. & Liskay, R. M. (1994). Mutation in the DNA mismatch repair gene homologue hMLH1 is associated with hereditary non-polyposis colon cancer. Nature 368, 258-261.

[0155] Buerstedde, J.-M., Alday, P., Torhorst, J., Weber, W., Muller, H. & Scott, R. (1995). Detection of new mutations in six out of ten Swiss HNPCC families by genomic sequencing of the hMSH2 and hMLH1 genes. J. Med. Genet. 32, 909-912.

[0156] Chen, C. & Kolodner, R. D. (1999). Gross chromosomal rearrangements in Saccharomyces cerevisiae replication and recombination defective mutants. Nature Genetics 23(1), 81-85.

[0157] Clark, A. B., Cook, M. E., Tran, H. T., Gordenin, D. A., Resnick, M. & Kunkel, T. A. (1999). Functional analysis of human MutSα and MutSβ complexes in yeast. Nucleic Acids Res. 27(3), 736-742.

[0158] Cunningham, J. M., Kim, C.-Y., Christensen, E. R., Tester, D. J., Parc, Y., Burgart, L. J., Hailing, K. C., McDonnell, S. K., Schaid, D. J., Vockley, C. W., Kubly, V., Nelson, H., Michels, V. V. & Thibodeau, S. N. (2001). The frequency of hereditary defective mismatch repair in a prospective series of unselected colorectal carcinomas. Am. J. Hum. Genet. 69, 780-790.

[0159] Das Gupta, R. & Kolodner, R. D. (2000). Novel dominant mutations in Saccharomyces cerevisiae MSH6. Nature Genetics 24, 53-56.

[0160] Drotschmann, K., Clark, A. B. & Kunkel, T. A. (1999a). Mutator phenotypes of common polymorphisms and missense mutations in MSH2. Current Biology 9, 907-910.

[0161] Drotschmann, K., Clark, A. B., Tran, H. T., Resnick, M. A., Gordenin, D. A. & Kunkel, T. A. (1999b). Mutator phenotypes of yeast strains heterozygous for mutations in the MSH2 gene. Proc. Natl. Acad. Sci. USA 96(March), 2970-2975.

[0162] Fishel, R., Lescoe, M. K., Rao, M. R. S., Copeland, N. G., Jenkins, N. A., Garber, J., Kane, M. & Kolodner, R. (1993). The Human Mutator Gene Homolog MSH2 and Its Association with Hereditary Nonpolyposis Colon Cancer. Cell 75, 1027-1038.

[0163] Fishel, R. & Wilson, T. (1997). MutS homologs in mammalian cells. Curr. Opin. Genet. Dev. 7, 105-113.

[0164] Froggatt, N. J., Brasset, C., Koch, D. J., Evans, D. G., Hodgson, S. V., Popnder, B. A. & Maher, E. R. (1996). Mutation Screening of MSH2 and MLH1 mRNA in hereditary non-polyposis colon cancer syndrome. J. Med. Genet. 33(9), 726-730.

[0165] Gordenin, D. A., Proscyavivhus, Y. Y., Malkova, A. L., Trofimova, M. V. & Peterzen, A. (1991). Yeast mutants with increased bacterial transposon Tn5 excision. Yeast 7, 37-50.

[0166] Greene, C. N. & Jinks-Robertson, S. (1997). Frameshift intermediates in homopolymer runs are removed efficiently by yeast mismatch repair proteins. Mol. Cell. Biol. 17, 284-2850.

[0167] Hackman, P., Tannergard, P., Osei-Mensa, S., Chen, J., Kane, M. F., Kolodner, R., Lambert, B., Hellgren, D. & Lindblom, A. (1997). A human compound heterozygote for two MLH1 missense mutations. Nature Genetics 17, 135-136.

[0168] Han, H.-J., Yuan, Y., Ku, J.-L., Oh, Y. J., Won, Y. J., Kang, K. J., Kim, K. Y., Kim, S., Kim, C. Y., Kim, J.-P., Oh, N.-G., Lee, K. H., Choe, K. J. N., Y. & Park, J. G. (1996). Germline Mutations of hMLH1 and hMSH2 Genes in Korean Hereditary Nonpolyposis Colorectal Cancer. J. Natl. Cancer Inst. 88(18), 14317-1319.

[0169] Hangaishi, A., Ogawa, S., Mitani, K., Hosoya, N., Chiba, S., Yazaki, Y. & Hirai, H. (1997). Mutations and loss of expression of a mismatch repair gene, hMLH1, in leukemia and lymphoma cell lines. Blood 89(5), 1740-1747.

[0170] Harfe, B. D. & Jinks-Roberstson, S. (1999). Removal of Frqameshift Intermediates by Mismatch Repair Proteins in Saccharomyces cerevisiae. Mol. Cell. Biol. 19(7), 4766-4773.

[0171] Herman, J. G., Umar, A., Polyak, K., Graff, J. R., Ahuja, N., Issa, J. P., Markowitz, S., Willson, J. K. V., Hamilton, S. R., Kinzler, K. W., Kane, M. F., Kolodner, R. D., Vogelstein, B., Kunkel, T. & Baylin, S. B. (1998). Incidence and functional consequences of hMLH1 promoter hypermethylation in colorectal carcinoma. Proc. Natl. Acad. Sci. USA 95, 6870-6875.

[0172] Hoffman, C. S. & Winston, F. (1987). A ten-minute DNA preparation from yeast efficiently releases autonomous plasmids for transformation of Escherichia coli. Gene 57, 267-272.

[0173] Hutter, P., Couturier, A., Scott, R. J., Alday, P., Delozier-Blanchet, C., Cachat, F., Antonarakis, S. E., Joris, F., Gaudin, M., D'Amato, L. & Buerstedde, J.-M. (1996). Complex genetic predisposition to cancer in an extended HNPCC family with an ancestral hMLH1 mutation. J. Med. Genet. 33, 636-640.

[0174] Ishioka, C., Frebourg, T., Yan, Y. X., Vidal, M., Friend, S. H., Schmidt, S. & Iggo, R. (1993). Screening patients for heterozygous p53 mutations using a functional assay in yeast. Nat. Genet. 5(2), 124-129.

[0175] Ito, H., Fukuda, Y., Murata, K. & Kimura, A. (1983). Transformation of intact yeast cells treated with alkali cations. Journal of Bacteriology 153, 163-168.

[0176] Jakubowska, A., Gorski, B., Kurzaski, G., Debniak, T., Hadaczek, P., Cybulski, C., Kladny, J., Oszurek, O., Scott, R. J. & Lubinski, J. (2001). Optimization of experimental conditions for RNA-based sequencing of MLH1 and MSH2 genes. Human Mutation 17, 52-60.

[0177] Jiricny, J. & Nystrom-Lahti, M. (2000). Mismatch Repair Defects in Cancer. Curr. Opin. Genet. & Dev. 10, 157-161.

[0178] Kinzler, K. W. & Vogelstein, B. (1996). Lessons from Hereditary Colorectal Cancer. Cell 87(2), 159-170.

[0179] Kolodner, R. D. (2000). Guarding Against Mutations. Nature 407, 687-689.

[0180] Kolodner, R. D. & Marisischky, G. T. (1999). Eukaryotic DNA mismatch Repair. Current Opinion in Genetics and Development 9, 89-96.

[0181] Lamers, M. H., Perrakis, A., Enzlin, J. H., Winterwerp, H. H. K., de Wind, N. & Sixma, T. K. (2000). The Crystal Structure of DNA Mismatch Repair Protein MutS binding to a G:T Mismatch. Nature 407, 711-717.

[0182] Leach, F. S., Nicolaides, N. C., Papadopoulos, N., Liu, B., Jen, J., Parsons, R., Peltomaki, P., Sistonen, P., Aaltonen, L. A., Nystrom-Lahti, M., Guan, X. Y., Zhang, J., Meltzer, P. S., Yu, J.-W., Kao, F.-T., Chen, D. J., Cerosaletti, K. M., Fournier, R. E. K., Todd, S., Lewis, T., Leach, R. J., Naylor, S. L., Weissenbach, J., Mecklin, J.-P., Jarvinen, H., Petersen, G. M., Hamilton, S. R., Green, J., Jass, J., Watson, P., Lynch, H. T., Trent, J. M., Chapell, A. d. l., Kinzler, K. W. & Vogelstein, B. (1993). Mutations of a mutS Homolog in Hereditary Nonpolyposis Colorectal Cancer. Cell 75, 1215-1225.

[0183] Liu, B., Nicolaides, N. C., Markowitz, S., Parsons, R. E., Papadopoulous, N., Nicolaides, N. C., Lynch, H. T., Watson, P., Jass, J. R., Dunlop, M., Wyllie, A., Peltomaki, P., Chapelle, A. d. l., Hamilton, S. R., Vogelstein, B. & Kinzler, K. W. (1996). Analysis of mismatch repair genes in hereditary non-polyposis colorectal cancer patients. Nature Medicine 2, 169-174.

[0184] Liu, B., Nicolaides, N. C., Markowitz, S., Willson, J. K. V., Parsons, R. E., Jen, J., Papadopoulos, N., Peltomaki, P., de la Chapelle, A., Hamilton, S. R., Kinzler, K. W. & Vogelstein, B. (1995). Mismatch repair gene defects in sporadic colorectal cancers with microsatellite instability. Nature Genetics 9, 48-55.

[0185] Liu, H.-H., Cartegni, L., Zhang, M. Q. & Krainer, A. R. (2001). A mechanism for exon skipping caused by nonsense or missense mutations in BRCA1 and other genes. Nature Genetics 27(1), 55-58.

[0186] Lowsky, R., DeCoteau, J. F., Reitmair, A. H., Ichinohasama, R., Dong, W. F., Wu, Y., Mak, T. W., Kadin, M. E. & Minden, M. D. (1997). Defects in the mismatch repair gene MSH2 are implicated in the development of murine and human lymphoblastic lymphomas and are associated with the aberrant expression of rhombotin-2 (Lmo-2) and Tal-1 (SCL). Blood 89(7), 2276-2282.

[0187] Maliaka, Y. K., Chudina, A. P., Belev, N. F., Alday, P., Bochkov, N. P. & Buerstedde, J.-M. (1996). CpG dinucleotides in the hMSH2 and hMLH1 genes are hotspots for HNPCC mutations. Hum. Genet. 97, 251-255.

[0188] Maniatis, T., Fritsch, E. F. & Sambrook, J. (1989). Molecular Cloning. A Laboratory Manual, 2nd edition, Cold Spring Harbor Laboratory Press.

[0189] Marischky, G. T., Filosi, N., Kane, M. F. & Kolodner, R. (1996). Redundancy of Saccharomyces cerevisiae MSH3 and MSH6 in MSH2-dependent mismatch repair. Genes Dev. 10, 407-420.

[0190] Miyaki, M., Konishi, M., Muraoka, M., Kikuchi-Yanoshita, R., Tanaka, K., Iwama, T., Mori, T., Koike, M., Ushio, K., Chiba, M., Nomizu, S. & Utsunomiya, J. (1995). Germ line mutations of hMSH2 and hMLH1 genes in Japanese families with hereditary nonpolyposis colorectal cancer (HNPCC): usefulness of DNA analysis for screening and diagnosis of HNPCC patients. J. Mol. Med. 73, 515-520.

[0191] Moslein, G., Tester, D. T., Lindor, N. M., Honchel, R., Cunningham, J. M., French, A. J., Halling, K. C., Schwab, M., Goretski, P. & Thibodeau, S. N. (1996). Microsatellite instability and mutation analysis of hMSH2 and hMLH1 in patients with sporadic, familial and hereditary colorectal cancer. Hum. Mol. Genet. 9, 1245-1252.

[0192] Mumberg, D., Muller, R. & Funk, M. (1994). Regulatable promoters of Saccharomyces cerevisiae: comparison of transcriptional activity and their use for heterologous expression. Mol. Gen. Genet. 22(25), 5767-5768.

[0193] Nicolaides, N. C., Littman, S. J., Modrich, P., Kinzler, K. W. & Vogelstein, B. (1998). A Naturally Ocurring hPMS2 Mutatin Can Confer a Dominant Negative Mutator Phenotype. Mol. Cell. Biol. 18(3), 1635-1641.

[0194] Nicolaides, N. C., Papadopoulos, N., Liu, B., Wei, Y.-f., Carter, K. C., Ruben, S. M., Rosen, C. A., Hazeltine, W. A., Fleischman, R. D., Fraser, C. M., Adams, M. D., Venter, J. C., Dunlop, M. G., Hamilton, S. R., Petersen, G. M., Chapelle, A. d. l., Vogelstein, B. & Kinzler, K. W. (1994). Mutations of two PMS homologues in hereditary nonpolyposis colon cancer. Nature 371, 75-80.

[0195] Nystrom-Lahti, M., Wu, Y., Moisio, A.-L., Hofstra, R. M. W., Osinga, J., Mecklin, J.-P., Jarvinen, H. J., Leisti, J., Buys, C., de la Chapelle, A. & Peltomaki, P. (1996). DNA mismatch repair gene mutations in 55 kindreds with verified or putative hereditary non-polyposis colorectal cancer. Hum. Mol. Genet. 5, 763-769.

[0196] Obmolova, G., Ban, C., Hsieh, P. & Yang, W. (2000). Crystal Structure of Mismatch Repair Protein MutS and its Complex with a Substrate DNA. Nature 407, 703-710.

[0197] Pang, Q., Prolla, T. A. & Liskay, R. M. (1997). Functional Domains of the Saccharomyces cerevisiae Mlh1p and Pms1p DNA Mismatch Repair Proteins and Their Relevance to Human Hereditary Nonpolyposis Colorectal Cancer—Associated Mutations. Mol. Cell. Biol. 17(8), 4465-4473.

[0198] Papadopoulos, N. & Lindblom, A. (1997). Molecular Basis of HNPCC: Mutations of MMR Genes. Human Mutation 10, 89-99.

[0199] Papadopoulos, N., Nicoolaides, N. C., Wei, Y.-F., Ruben, S. M., Carter, K. C., Rosen, C. A., Hazeltine, W. A., Fleischman, R. D., Fraser, C. M., Adams, M. D., Venter, J. C., Hamilton, S. R., Petersen, G. M., Watson, P., Lynch, H. T., Peltomaki, P., Mecklin, J.-P., Chapelle, A. d. l., Kinzler, K. W. & Vogelstein, B. (1994). Mutation of a mutL Homolog in Hereditary Colon Cancer. Science 263, 1625-1629.

[0200] Peltomaki, P. & Chapelle, A. d. l. (1997). Mutations predisposing to hereditary nonpolyposis colorectal cancer. Adv. Cancer Res. 71, 93-119.

[0201] Peltomaki, P., Vasen, H. & HNPCC, T. I. C. G. o. (1997). Mutations Predisposing to Hereditary Nonpolyposis Colorectal Cancer: Database and Results of a Collaborative Study. Gastroenterology 113, 1146-1158.

[0202] Polaczek, P., Putzke, A. P., Leong, K. & Bitter, G. A. (1998). Functional genetic tests of DNA mismatch repair protein activity in Saccharomyces cerevisiae. Gene 213, 159-167.

[0203] Scharer, E. & Iggo, R. (1992). Mammalian p53 can function as a transcription factor in yeast. Nucleic Acids Res. 20, 1539-1545.

[0204] Semba, S., Yokozaki, H., Yamamoto, S., Yasui, W. & Tahara, E. (1996). Microsatellite instability in in precancerous lesions and adenocarcinomas of the stomach. Cancer 77, 1620-1627.

[0205] Shcherbakova, P. V., Hall, M. C., Lewis, M. S., Bennett, S. E., Martin, K. J., Bushel, P. R., Afshari, C. A. & Kunkel, T. A. (2001). Inactivation of DNA Mismatch Repair by Increased Expression of Yeast MLH1. Mol Cell. Biol. 21(3), 940-951.

[0206] Shcherbakova, P. V. & Kunkel, T. (1999). Mutator Phenotypes Conferred by MLH1 Overexpression and by Heterozygosity for mlh1 Mutations. Mol. Cell. Biol. 19(4), 3177-3183.

[0207] Shimodaira, H., Filosi, N., Shibata, H., Suzuki, T., Radice, P., Kanamaru, R., Friend, S. H., Kolodner, R. D. & Ishioka, C. (1998). Functional analysis of human MLH1 mutations in Saccharomyces cerevisiae. Nature Genetics 19, 384-389.

[0208] Sikorski, R. S. & Hieter, P. (1989). A system of shuttle vectors and yeast host strains designed for efficient manipulation of DNA in Saccharomyces cerevisiae. Genetics 122(1), 19-27.

[0209] Strand, M., Prolla, T. A., Liskay, R. M. & Petes, T. D. (1993). Destabilization of tracts of simple repetitive DNA in yeast by mutations affecting DNA mismatch repair. Nature 365, 274-276.

[0210] Studamire, B., Price, G., Sugawara, N., Haber, J. & Alani, E. (1999). Separation-of-Function Mutations in Saccharomyces cerevisiae MSH2 That Confer Mismatch Repair Defects but Do Not Affect Nonhomologous-Tail Removal during Recombination. Mol. Cell. Biol. 19(11), 7558-7567.

[0211] Syngal, S., Fox, E. A., Li, C., Dovidio, M., Eng, C., Kolodner, R. D. & Garber, J. E. (1999). Interpretation of genetic test results for hereditary nonpolyposis colorectal cancer: implications for clinical predisposition testing. JAMA 282(3), 247-253.

[0212] Tannergard, P., Lipford, J. R., Koldner, R., Frodin, J. E., Nordenskjold, M. & A. Lindblom. (1995). Missense mutations in the MLH1 gene in Swedish HNPCC families. Cancer Research 55, 6092-6096.

[0213] Terdiman, J. P., Gum Jr., J. R., Conrad, P. G., Miller, G. A., Weinberg, V., Crawley, S. C., Levin, T. R., Reeves, C., Schmitt, A., Hepburn, M., Sleisenger, M. H. & Kim, Y. S. (2001). Efficient detection of hereditary nonpolyposis colorectal cancer gene carriers by screening for tumor microsatellite instability before germline testing. Gastroenterology 120, 21-30.

[0214] Tomlinson, I. P. M., Beck, N. E., Homfray, T., Harocopos, C. J. & Bodmer, W. F. (1997). Germline HNPCC gene variants have little influence on the risk for sporadic colorectal cancer. J. Med. Genet. 34, 39-42.

[0215] Tran, H. T., Keen, J. D., Kricker, M., Resnick, M. A. & Gordenein, D. A. (1997). Hypermutability of Homonucleotide Runs in Mismatch Repair and DNA Polymerase Proofreading Yeast Mutants. Mol. Cell. Biol. 17(5), 2859-2865.

[0216] Vasen, H. F., Mecklin, J. P., Khan, P. M. & Lynch, H. T. (1991). The International Collaborative Group on Hereditary Non-Polypolposis Colorectal Cancer (ICG-HNPCC). Dis. Colon Rectum 34(5), 424-425.

[0217] All publications and patent applications mentioned in this specification are herein incorporated by reference to the same extent as if each individual publication or patent application was specifically and individually indicated to be incorporated by reference.

[0218] The invention now being fully described, it will be apparent to one of ordinary skill in the art that many changes and modifications can be made thereto without departing from the spirit or scope of the invention as described herein.

1. A method for distinguishing efficiency polymorphisms from inactivating mutations and silent polymorphisms in a human gene encoding a protein involved in DNA mismatch repair, comprising:
expressing a test genetic sequence in a null yeast host in which the native yeast DNA mismatch repair gene which is the orthologue of said human gene has been deleted or modified to inactivate its function in DNA mismatch repair, and
comparing the mutation rate of a reporter gene in the null yeast host of the previous step with the mutation rate of the same reporter gene in (1) the null yeast host which has not been transformed to express said test genetic sequence and (2) the null yeast host which has been transformed to express the yeast orthologue of said human gene, or a hybrid human-yeast orthologue of said human gene, in order to determine if the test genetic sequence is an efficiency polymorphism.

2. The method of claim 1, wherein the test genetic sequence is a yeast orthologue variant of the human gene sequence or a human-yeast hybrid sequence of said variant.

3. The method of claim 1, wherein the human gene involved in DNA mismatch repair is selected from the group consisting of the hMSH2 (SEQ ID NO: 3), hMSH3 (SEQ ID NO: 4), hMSH4 (SEQ ID NO: 5), hMSH6 (SEQ ID NO: 6), hMLH1 (SEQ ID NO: 7), hMLH3 (SEQ ID NO: 8), hPMS1 (SEQ ID NO: 9) and hPMS2 (SEQ ID NO: 10) genes.

4. The method of claim 3, wherein said human gene involved in DNA mismatch repair is selected from the group consisting of the hMLH1 (SEQ ID NO: 7) and hMSH2 (SEQ ID NO: 3) genes.

5. The method of claim 4, which is used to distinguish among the following variants in the hMLH1 gene: S44A (SEQ ID NO: 232), S44F (SEQ ID NO: 126), S44R (SEQ ID NO: 233), S44C (SEQ ID NO: 234), S44Q (SEQ ID NO: S35), S44H (SEQ ID NO: 236), S441 (SEQ ID NO: 237), S44L (SEQ ID NO: 238), S44P (SEQ ID NO: 239), S44T (SEQ ID NO: 240), S44W (SEQ ID NO: 241), S44Y (SEQ ID NO: 242), S44V (SEQ ID NO: 243), G67R (SEQ ID NO: 244), I68N (SEQ ID NO: 245), E102K (SEQ ID NO: 246), I107R (SEQ ID NO: 247), T117R (SEQ ID NO: 248), Q542L (SEQ ID NO: 249), R659P (SEQ ID NO: 250), R217C (SEQ ID NO: 251), R265C (SEQ ID NO: 252), R265H (SEQ ID NO: 253), V3261 (SEQ ID NO: 254), V326A (SEQ ID NO: 127), Q62K (SEQ ID NO: 255), R69K (SEQ ID NO: 256), I219V (SEQ ID NO: 257), A681T (SEQ ID NO: 258), I25F (SEQ ID NO: 259), I25T (SEQ ID NO: 260), P28L (SEQ ID NO: 261), N64S (SEQ ID NO: 262), A111V (SEQ ID NO: 263), 1262-del (SEQ ID NO: 264), L653R (SEQ ID NO: 265), P654L (SEQ ID NO: 266), R659L (SEQ ID NO: 267), T821 (SEQ ID NO: 268), K84E (SEQ ID NO: 269), R755W (SEQ ID NO: 270), S93G (SEQ ID NO: 271), I219L (SEQ ID NO: 272), E663D (SEQ ID NO: 273), H718Y (SEQ ID NO: 274), L729V (SEQ ID NO: 275), K75 IR (SEQ ID NO: 276),

6. The method of claim 5, which is used to identify any of the following variants as an efficiency polymorphism: R217C (SEQ ID NO: 251), R265C (SEQ ID NO: 252), R265H (SEQ ID NO: 253), V326A (SEQ ID NO: 127), Q62K (SEQ ID NO: 255), R69K (SEQ ID NO: 256), I25F (SEQ ID NO: 259), I25T (SEQ ID NO: 260), P28L (SEQ ID NO: 261), N64S (SEQ ID NO: 262), A111V (SEQ ID NO: 263), 1262-del (SEQ ID NO: 264), L653R (SEQ ID NO: 265), P654L (SEQ ID NO: 266), R659L (SEQ ID NO: 267).

7. The method of claim 5, which is used to identify any of the following variants as an inactivating mutation: S44F (SEQ ID NO: 126), S44R (SEQ ID NO: 233), S44C (SEQ ID NO: 234), S44Q (SEQ ID NO: 235), S44H (SEQ ID NO: S36), S441 (SEQ ID NO: 237), S44L (SEQ ID NO: 238), S44P (SEQ ID NO: 239), S44T (SEQ ID NO: 240), S44W (SEQ ID NO: 241), S44Y (SEQ ID NO: 242), S44V (SEQ ID NO: 243), G67R (SEQ ID NO: 244), 168N (SEQ ID NO: 245), E102K (SEQ ID NO: 246), 1107R (SEQ ID NO: 247), T117R (SEQ ID NO: 248), Q542L (SEQ ID NO: 249), R659P (SEQ ID NO: 250) T821 (SEQ ID NO: 251), K84E (SEQ ID NO: 252) and R755W (SEQ ID NO: 270).

8. The method of claim 5, which is used to identify any of the following variants as a silent polymorphism: S44A (SEQ ID NO: 232), I219V (SEQ ID NO: 257), A681T (SEQ ID NO: 258), S93G (SEQ ID NO: 271), V3261 (SEQ ID NO: 254), I219L (SEQ ID NO: 272), E663D (SEQ ID NO: 273), H718Y (SEQ ID NO: 274), L729V (SEQ ID NO: 275) and K751R (SEQ ID NO: 276).

9. The method of claim 4, which is used to identify the following efficiency polymorphisms in the hMSH2 gene: G322D (SEQ ID NO: 66) and R524P (SEQ ID NO: 277).

10. A method for identifying defects in genes involved in DNA mismatch repair, comprising:
producing by random mutagenesis or in vitro mutagenic DNA synthesis a pool of
mutagenized DNA molecules corresponding to said gene, or a region of the coding sequence therof,
expressing said pool of DNA molecules in yeast host cells,
growing the yeast host cells, and
screening for yeast clones which exhibit a deficiency in DNA mismatch repair.

11. The method of claim 10, which is used to evaluate a DNA mismatch repair gene selected from the group consisting of the hMSH2 (SEQ ID NO: 3), hMSH3 (SEQ ID NO: 4), hMSH4 (SEQ ID NO: 5), hMSH6 (SEQ ID NO: 6), hMLH1 (SEQ ID NO: 7), hMLH3 (SEQ ID NO: 8), hPMS1 (SEQ ID NO: 9) and hPMS2 (SEQ ID NO: 10) genes.

12. The method of claim 11, wherein said human gene involved in DNA mismatch repair is selected from the group consisting of the hMLH1 (SEQ ID NO: 7) and hMSH2 (SEQ ID NO: 3) genes.

13. The method of claim 10 which is used to identify the following as inactivating mutations in hMLH1: L11H (SEQ ID NO: 278), I19F (SEQ ID NO: 279), K33N (SEQ ID NO: 280), N38D (SEQ ID NO: 281), N38S (SEQ ID NO: 282), L40T (SEQ ID NO: 283), D41G (SEQ ID NO: 284), S44V (SEQ ID NO: 243), T45I (SEQ ID NO: 285), V49A (SEQ ID NO: 286), K52I (SEQ ID NO: 287), K52E (SEQ ID NO: 288), E53V (SEQ ID NO: 289), G54R (SEQ ID NO: 290), G55R (SEQ ID NO: 291), G55D (SEQ ID NO: 292), K57E (SEQ ID NO: 293), Q60P (SEQ ID NO: 294), I61K (SEQ ID NO: 295), G65R (SEQ ID NO: 296), G67V (SEQ ID NO: 297), G67E (SEQ ID NO: 298), D72V (SEQ ID NO: 299), L73Q (SEQ ID NO: 300), C77R (SEQ ID NO: 301), C77G (SEQ ID NO: 302), E78V (SEQ ID NO: 303), F80L (SEQ ID NO: 304), T81M (SEQ ID NO: 305), K84R (SEQ ID NO: 306), K84E (SEQ ID NO: 269), L85S (SEQ ID NO: 307), A103P (SEQ ID NO: 308), T116S (SEQ ID NO: 309), K118I (SEQ ID NO: 10), G133E (SEQ ID NO: 311), P139H (SEQ ID NO: 312), A143V (SEQ ID NO: 313), G147S (SEQ ID NO: 314).

14. A method for determining whether a genetic sequence in an individual is associated with a defect in DNA mismatch repair, comprising comparing said genetic sequence with a genetic information database that has been compiled by use of the method of claims 1 or 10.

15. The method of claim 14, which is used to evaluate predisposition to the onset of cancer in a human.

16. A DNA molecule encoding a yeast protein involved in DNA mismatch repair in which a portion of the coding sequence has been replaced with the homologous coding sequence of the human orthologue to produce a hybrid human-yeast gene, such that the protein expression product of the hybrid gene retains function in DNA mismatch repair in vivo.

17. The method of claim 16, wherein said yeast DNA molecule encoding a yeast protein involved in DNA mismatch repair is selected from the group consisting of the MLH1 (SEQ ID NO: 1) and MSH2 (SEQ ID NO: 2) genes and said human orthologue is selected from the group consisting of the hMLH1 (SEQ ID NO: 7) and hMSH2 (SEQ ID NO: 3) genes.

18. An efficiency polymorphism in a variant of a DNA mismatch repair gene which has been identified by use of a method according to claims 1, 10 or 14.

19. An inactivating mutation in a variant of a DNA mismatch repair gene which has been identified by use of a method according to claims 1, 10 or 14.

20. A silent polymorphism in a variant of a DNA mismatch repair gene which has been identified by use of a method according to claims 1, 10 or 14.

21. A variant of the hMLH1 DNA mismatch repair gene which encodes an efficiency polymorphism selected from the group consisting of 217C (SEQ ID NO: 251), 265C (SEQ ID NO: 252), 265H (SEQ ID NO: 253), 326A (SEQ ID NO: 127), 62K (SEQ ID NO: 255), 69K (SEQ ID NO: 256), 25F (SEQ ID NO: 259), 25T (SEQ ID NO: 260), 28L (SEQ ID NO: 261), 64S (SEQ ID NO: 262), 111V (SEQ ID NO: 263), 262-del (SEQ ID NO: 264), 653R (SEQ ID NO: 265), 654L (SEQ ID NO: 266) and 659L (SEQ ID NO: 267).

22. A variant of the hMLH1 DNA mismatch repair gene which encodes an inactivating mutation selected from the group consisting of 44F (SEQ ID NO: 126), 44R (SEQ ID NO: 233), 44C (SEQ ID NO: 234), 44Q (SEQ ID NO: 235), 44H (SEQ ID NO: 236), 441 (SEQ ID NO: 237), 44L (SEQ ID NO: 238), 44P (SEQ ID NO: 239), 44T (SEQ ID NO: 240), 44W (SEQ ID NO: 241), 44Y (SEQ ID NO: 242), 44V (SEQ ID NO: 243), 67R (SEQ ID NO: 244), 68N (SEQ ID NO: 245), 102K (SEQ ID NO: 246), 107R (SEQ ID NO: 247), 117R (SEQ ID NO: 248), 542L (SEQ ID NO: 249), 659P (SEQ ID NO: 250), 82I (SEQ ID NO: 251), 84E (SEQ ID NO: 252) and 755W (SEQ ID NO: 280).

23. A variant of the hMLH1 DNA mismatch repair gene which encodes a silent polymorphism selected from the group consisting of 44A (SEQ ID NO: 232), 2191 (SEQ ID NO: 315), 219V (SEQ ID NO: 257), 681 T (SEQ ID NO: 258), 93G (SEQ ID NO: 271), 219L (SEQ ID NO: 272), 3261 (SEQ ID NO: 254), 663D (SEQ ID NO: 273), 718Y (SEQ ID NO: 274), 729V (SEQ ID NO: 275) and 751R (SEQ ID NO: 276).

24. A variant of the hMSH2 DNA mismatch repair gene which encodes an efficiency polymorphism selected from the group consisting of 322D (SEQ ID NO: 66) and 524P (SEQ ID NO: 277).

The application's sequence listing, which the Patent Office published only in electronic form, follows.

SEQUENCE LISTING (315 sequences)

SEQ ID NO: 1 - DNA, 2310 bp, Saccharomyces cerevisiae
atgtctctcagaataaaagcacttgatgcatcagtggttaacaaaattgctgcaggtgagatcataatatcccccgtaaatgctctcaaagaaatgatggagaattccatcgatgcgaatgctacaatgattgatattctagtcaaggaaggaggaattaaggtacttcaaataacagataacggatctggaattaataaagcagacctgccaatcttatgtgagcgattcacgacgtccaaattacaaaaattcgaagatttgagtcagattcaaacgtatggattccgaggagaagctttagccagtatctcacatgtggcaagagtcacagtaacgacaaaagttaaagaagacagatgtgcatggagagtttcatatgcagaaggtaagatgttggaaagccccaaacctgttgctggaaaagacggtaccacgatcctagttgaagacctttttttcaatattccttctagattaagggccttgaggtcccataatgatgaatactctaaaatattagatgttgtcgggcgatacgccattcattccaaggacattggcttttcttgtaaaaagttcggagactctaattattctttatcagttaaaccttcatatacagtccaggataggattaggactgtgttcaataaatctgtggcttcgaatttaattacttttcatatcagcaaagtagaagatttaaacctggaaagcgttgatggaaaggtgtgtaatttgaatttcatatccaaaaagtccatttcattaatttttttcattaataatagactagtgacatgtgatcttctaagaagagctttgaacagcgtttactccaattatctgccaaagggcttcagaccttttatttatttgggaattgttatagatccggcggctgttgatgttaacgttcacccgacaaagagagaggttcgtttcctgagccaagatgagatcatagagaaaatcgccaatcaattgcacgccgaattatctgccattgatacttcacgtactttcaaggcttcttcaatttcaacaaacaagccagagtcattgataccatttaatgacaccatagaaagtgataggaataggaagagtctccgacaagcccaagtggtagagaattcatatacgacagccaatagtcaactaaggaaagcgaaaagacaagagaataaactagtcagaatagatgcttcacaagctaaaattacgtcatttttatcctcaagtcaacagttcaactttgaaggatcgtctacaaagcgacaactgagtgaacccaaggtaacaaatgtaagccactcccaagaggcagaaaagctgacactaaatgaaagcgaacaaccgcgtgatgccaatacaatcaatgataatgacttgaaggatcaacctaagaagaaacaaaagttgggggattataaagttccaagcattgccgatgacgaaaagaatgcactcccgatttcaaaagacgggtatattagagtacctaaggagcgagttaatgttaatcttacgagtatcaagaaattgcgtgaaaaagtagatgattcgatacatcgagaactaacagacatttttgcaaatttgaattacgttggggttgtagatgaggaaagaagattagccgctattcagcatgacttaaagctttttttaatagattacggatctgtgtgctatgagctattctatcagattggtttgacagacttcgcaaactttggtaagataaacctacagagtacaaatgtgtcagatgatatagttttgtataatctcctatcagaatttgacgagttaaatgacgatgcttccaaagaaaaaataattagtaaaatatgggacatgagcagtatgctaaatgagtactattccatagaattggtgaatgatggtctagataatgacttaaagtctgtgaagctaaaatctctaccactacttttaaaaggctacattccatctctggtcaagttaccattttttatatatcgcctgggtaaagaagttgattgggaggatgaacaagagtgtctagatggtattttaagagagattgcattactctatatacctgatatggttccgaaagtcgatacactcgatgcatcgttgtcagaagacgaaaaagcccagtttataaatagaaaggaacacatatcctcattactagaacacgttctcttcccttgtatcaaacgaaggttcctggcccctagacacattctcaaggatgtcgtggaaatagccaaccttccagatctatacaaagtttttgagaggtgttaa

SEQ ID NO: 2 - DNA, 2901 bp, Saccharomyces cerevisiae
atgtcctccactaggccagagctaaaattctctgatgtatcagaggagagaaacttctataagaagtatacagggttgccgaagaaaccattaaaaaccattagattagtggataaaggcgactattacacagttataggttcagatgcgatatttgtggcagattcagtctatcatactcaatctgttttaaagaactgccaattggaccctgtaacggcaaagaacttccatgaaccaactaaatatgttactgtttcgctacaagttcttgccactctgctgaagttatgtttgttggatctgggatataaagttgagatatacgataagggttggaaattaataaaaagcgcatctccagggaacattgagcaagttaatgagctaatgaatatgaatattgattcgagtatcatcattgcaagtttgaaagttcaatggaattcccaagatggaaactgcattattggagttgctttcattgataccactgcatacaaggtgggaatgcttgatattgtcgataatgaagtgtattccaacctagagagtttcttgattcaattgggtgtaaaggaatgtttggtgcaggacttgacatcaaattcaaactccaatgctgaaatgcagaaagtaataaatgtaattgatcgctgtgggtgcgtcgttacattattgaaaaactcagaattttctgaaaaagatgtcgaactggatttaaccaagttactgggcgatgatttggcattatcgttaccacaaaaatactctaaattatctatgggtgcatgcaatgcattgattggatatttacaattgctctcagagcaagatcaagtaggcaagtatgaattagttgaacataaattaaaggagtttatgaagttggatgcctccgctattaaagcccttaatttattcccacaaggaccacaaaatccatttggtagcaacaatttagctgtatctggatttacgagtgctggtaattctggtaaagtaacttctcttttccagttactgaatcattgcaaaacaaatgctggtgttcggcttttaaatgaatggttgaagcaaccactgaccaatattgacgaaattaataaaagacatgatttagtcgactatctaattgaccaaatcgagttaagacagatgttgacttctgaatatttacccatgattccagatattcgtagattgactaagaaattaaataaaagaggaaacttagaggatgtcttgaaaatttaccaattcagtaaaagaataccagaaattgttcaagttttcacttcgttcttggaggacgacagccccactgaaccagtaaacgaactggtccgctccgtttggctagctcctttaagccaccacgttgaacctttgtccaaattcgaagaaatggttgaaacaacggttgatttggatgcttatgaagaaaataacgaatttatgattaaagttgagtttaatgaggaattaggaaagataagaagtaaactggatacgttgcgtgatgaaattcattcaatccatcttgattctgctgaagatctaggattcgatccggacaaaaaactgaagttggagaaccatcatctgcatggttggtgtatgaggttgacacgtaatgacgccaaggagttacgtaaacataagaagtacattgagttgtcgacagtaaaagctggtatattttttagtaccaaacaattaaagtcaatcgccaatgaaaccaatattcttcaaaaggagtacgacaagcaacaatcggctctggttagagaaattataaatattacattaacgtacacaccagtttttgaaaaactatccttagtcttagcgcatttagatgtgattgcctcttttgctcatacttcctcgtatgctcctataccatacattagacccaagttgcatcccatggattcggaaagaagaactcacctaataagctcccgtcatccagtactggaaatgcaagacgatataagctttatatctaatgatgtcacattagagagtggaaagggcgactttttaatcataactggaccaaacatgggaggtaaatctacttacatcagacaggttggtgtgatttctttaatggcccaaattggttgtttcgtaccttgtgaagaagctgaaatagccatagtagatgcaattctttgcagggtcggggcaggagattcccaattgaaaggtgtttccacatttatggttgaaatattggaaactgcttctatactaaagaatgcgagtaagaattctttgattattgtagatgaactagggcgtggtactagtacatatgatggttttggtctagcttgggcaattgctgaacatatcgcaagtaagattggatgtttcgctttgtttgcaactcactttcatgaattgacagaattgtctgaaaaattgcccaatgtcaagaatatgcatgttgttgcacatatcgagaaaaatttaaaagaacaaaaacatgacgatgaggacatcacgttgttatacaaagttgagcctggtatttcagatcagtcttttggtattcatgttgcagaagttgttcaatttccagaaaaaattgttaaaatggctaaacgtaaagccaatgaattggacgatctaaaaactaataatgaagatttgaaaaaagctaagctatcattacaggaagttaacgaaggtaatattcgtttgaaggctttactgaaagagtggattagaaaagtgaaggaggagggtttacatgacccaagcaaaattactgaagaagcttcccagcataaaatacaagagctattgcgtgctatagcaaatgaaccagaaaaggaaaacgataattaccttgaaatatataaaagcccttgttgttataattaa

SEQ ID NO: 3 - DNA, 2805 bp, Homo sapiens
atggcggtgcagccgaaggagacgctgcagttggagagcgcggccgaggtcggcttcgtgcgcttctttcagggcatgccggagaagccgaccaccacagtgcgccttttcgaccggggcgacttctatacggcgcacggcgaggacgcgctgctggccgcccgggaggtgttcaagacccagggggtgatcaagtacatggggccggcaggagcaaagaatctgcagagtgttgtgcttagtaaaatgaattttgaatcttttgtaaaagatcttcttctggttcgtcagtatagagttgaagtttataagaatagagctggaaataaggcatccaaggagaatgattggtatttggcatataaggcttctcctggcaatctctctcagtttgaagacattctctttggtaacaatgatatgtcagcttccattggtgttgtgggtgttaaaatgtccgcagttgatggccagagacaggttggagttgggtatgtggattccatacagaggaaactaggactgtgtgaattccctgataatgatcagttctccaatcttgaggctctcctcatccagattggaccaaaggaatgtgttttacccggaggagagactgctggagacatggggaaactgagacagataattcaaagaggaggaattctgatcacagaaagaaaaaaagctgacttttccacaaaagacatttatcaggacctcaaccggttgttgaaaggcaaaaagggagagcagatgaatagtgctgtattgccagaaatggagaatcaggttgcagtttcatcactgtctgcggtaatcaagtttttagaactcttatcagatgattccaactttggacagtttgaactgactacttttgacttcagccagtatatgaaattggatattgcagcagtcagagcccttaacctttttcagggttctgttgaagataccactggctctcagtctctggctgccttgctgaataagtgtaaaacccctcaaggacaaagacttgttaaccagtggattaagcagcctctcatggataagaacagaatagaggagagattgaatttagtggaagcttttgtagaagatgcagaattgaggcagactttacaagaagatttacttcgtcgattcccagatcttaaccgacttgccaagaagtttcaaagacaagcagcaaacttacaagattgttaccgactctatcagggtataaatcaactacctaatgttatacaggctctggaaaaacatgaaggaaaacaccagaaattattgttggcagtttttgtgactcctcttactgatcttcgttctgacttctccaagtttcaggaaatgatagaaacaactttagatatggatcaggtggaaaaccatgaattccttgtaaaaccttcatttgatcctaatctcagtgaattaagagaaataatgaatgacttggaaaagaagatgcagtcaacattaataagtgcagccagagatcttggcttggaccctggcaaacagattaaactggattccagtgcacagtttggatattactttcgtgtaacctgtaaggaagaaaaagtccttcgtaacaataaaaactttagtactgtagatatccagaagaatggtgttaaatttaccaacagcaaattgacttctttaaatgaagagtataccaaaaataaaacagaatatgaagaagcccaggatgccattgttaaagaaattgtcaatatttcttcaggctatgtagaaccaatgcagacactcaatgatgtgttagctcagctagatgctgttgtcagctttgctcacgtgtcaaatggagcacctgttccatatgtacgaccagccattttggagaaaggacaaggaagaattatattaaaagcatccaggcatgcttgtgttgaagttcaagatgaaattgcatttattcctaatgacgtatactttgaaaaagataaacagatgttccacatcattactggccccaatatgggaggtaaatcaacatatattcgacaaactggggtgatagtactcatggcccaaattgggtgttttgtgccatgtgagtcagcagaagtgtccattgtggactgcatcttagcccgagtaggggctggtgacagtcaattgaaaggagtctccacgttcatggctgaaatgttggaaactgcttctatcctcaggtctgcaaccaaagattcattaataatcatagatgaattgggaagaggaacttctacctacgatggatttgggttagcatgggctatatcagaatacattgcaacaaagattggtgctttttgcatgtttgcaacccattttcatgaacttactgccttggccaatcagataccaactgttaataatctacatgtcacagcactcaccactgaagagaccttaactatgctttatcaggtgaagaaaggtgtctgtgatcaaagttttgggattcatgttgcagagcttgctaatttccctaagcatgtaatagagtgtgctaaacagaaagccctggaacttgaggagtttcagtatattggagaatcgcaaggatatgatatcatggaaccagcagcaaagaagtgctatctggaaagagagcaaggtgaaaaaattattcaggagttcctgtccaaggtgaaacaaatgccctttactgaaatgtcagaagaaaacatcacaataaagttaaaacagctaaaagctgaagtaatagcaaagaataatagctttgtaaatgaaatcatttcacgaataaaagttactacgtga

SEQ ID NO: 4 - DNA, 3414 bp, Homo sapiens
atgtctcgccggaagcctgcgtcgggcggcctcgctgcctccagctcagcccctgcgaggcaagcggttttgagccgattcttccagtctacgggaagcctgaaatccacctcctcctccacaggtgcagccgaccaggtggaccctggcgctgcagcggctgcagcggccgcagcggccgcagcgcccccagcgcccccagctcccgccttcccgccccagctgccgccgcacgtagctacagaaattgacagaagaaagaagagaccattggaaaatgatgggcctgttaaaaagaaagtaaagaaagtccaacaaaaggaaggaggaagtgatctgggaatgtctggcaactctgagccaaagaaatgtctgaggaccaggaatgtttcaaagtctctggaaaaattgaaagaattctgctgcgattctgcccttcctcaaagtagagtccagacagaatctctgcaggagagatttgcagttctgccaaaatgtactgattttgatgatatcagtcttctacacgcaaagaatgcagtttcttctgaagattcgaaacgtcaaattaatcaaaaggacacaacactttttgatctcagtcagtttggatcatcaaatacaagtcatgaaaatttacagaaaactgcttccaaatcagctaacaaacggtccaaaagcatctatacgccgctagaattacaatacatagaaatgaagcagcagcacaaagatgcagttttgtgtgtggaatgtggatataagtatagattctttggggaagatgcagagattgcagcccgagagctcaatatttattgccatttagatcacaactttatgacagcaagtatacctactcacagactgtttgttcatgtacgccgcctggtggcaaaaggatataaggtgggagttgtgaagcaaactgaaactgcagcattaaaggccattggagacaacagaagttcactcttttcccggaaattgactgccctttatacaaaatctacacttattggagaagatgtgaatcccctaatcaagctggatgatgctgtaaatgttgatgagataatgactgatacttctaccagctatcttctgtgcatctctgaaaataaggaaaatgttagggacaaaaaaaagggcaacatttttattggcattgtgggagtgcagcctgccacaggcgaggttgtgtttgatagtttccaggactctgcttctcgttcagagctagaaacccggatgtcaagcctgcagccagtagagctgctgcttccttcggccttgtccgagcaaacagaggcgctcatccacagagccacatctgttagtgtgcaggatgacagaattcgagtcgaaaggatggataacatttattttgaatacagccatgctttccaggcagttacagagttttatgcaaaagatacagttgacatcaaaggttctcaaattatttctggcattgttaacttagagaagcctgtgatttgctctttggctgccatcataaaatacctcaaagaattcaacttggaaaagatgctctccaaacctgagaattttaaacagctatcaagtaaaatggaatttatgacaattaatggaacaacattaaggaatctggaaatcctacagaatcagactgatatgaaaaccaaaggaagtttgctgtgggttttagaccacactaaaacttcatttgggagacggaagttaaagaagtgggtgacccagccactccttaaattaagggaaataaatgcccggcttgatgctgtatcggaagttctccattcagaatctagtgtgtttggtcagatagaaaatcatctacgtaaattgcccgacatagggaggggactctgtagcatttatcacaaaaaatgttctacccaagagttcttcttgattgtcaaaactttatatcacctaaagtcagaatttcaagcaataatacctgctgttaattcccacattcagtcagacttgctccggaccgttattttagaaattcctgaactcctcagtccagtggagcattacttaaagatactcaatgaacaagctgccaaagttggggataaaactgaattatttaaagacctttctgacttccctttaataaaaaagaggaaggatgaaattcaaggtgttattgacgagatccgaatgcatttgcaagaaatacgaaaaatactaaaaaatccttctgcacaatatgtgacagtatcaggacaggagtttatgatagaaataaagaactctgctgtatcttgtataccaactgattgggtaaaggttggaagcacaaaagctgtgagccgctttcactctccttttattgtagaaaattacagacatctgaatcagctccgggagcagctagtccttgactgcagtgctgaatggcttgattttctagagaaattcagtgaacattatcactccttgtgtaaagcagtgcatcacctagcaactgttgactgcattttctccctggccaaggtcgctaagcaaggagattactgcagaccaactgtacaagaagaaagaaaaattgtaataaaaaatggaaggcaccctgtgattgatgtgttgctgggagaacaggatcaatatgtcccaaataatacagatttatcagaggactcagagagagtaatgataattaccggaccaaacatgggtggaaagagctcctacataaaacaagttgcattgattaccatcatggctcagattggctcctatgttcctgcagaagaagcgacaattgggattgtggatggcattttcacaaggatgggtgctgcagacaatatatataaaggacggagtacatttatggaagaactgactgacacagcagaaataatcagaaaagcaacatcacagtccttggttatcttggatgaactaggaagagggacgagcactcatgatggaattgccattgcctatgctacacttgagtatttcatcagagatgtgaaatccttaaccctgtttgtcacccattatccgccagtttgtgaactagaaaaaaattactcacaccaggtggggaattaccacatgggattcttggtcagtgaggatgaaagcaaactggatccaggcacagcagaacaagtccctgattttgtcaccttcctttaccaaataactagaggaattgcagcaaggagttatggattaaatgtggctaaactagcagatgttcctggagaaattttgaagaaagcagctcacaagtcaaaagagctggaaggattaataaatacgaaaagaaagagactcaagtattttgcaaagttatggacgatgcataatgcacaagacctgcagaagtggacagaggagttcaacatggaagaaacacagacttctcttcttcattaa

SEQ ID NO: 5 - DNA, 4083 bp, Homo sapiens
atgtcgcgacagagcaccctgtacagcttcttccccaagtctccggcgctgagtgatgccaacaaggcctcggccagggcctcacgcgaaggcggccgtgccgccgctgcccccggggcctctccttccccaggcggggatgcggcctggagcgaggctgggcctgggcccaggcccttggcgcgatccgcgtcaccgcccaaggcgaagaacctcaacggagggctgcggagatcggtagcgcctgctgcccccaccagttgtgacttctcaccaggagatttggtttgggccaagatggagggttacccctggtggccttgtctggtttacaaccacccctttgatggaacattcatccgcgagaaagggaaatcagtccgtgttcatgtacagttttttgatgacagcccaacaaggggctgggttagcaaaaggcttttaaagccatatacaggttcaaaatcaaaggaagcccagaagggaggtcatttttacagtgcaaagcctgaaatactgagagcaatgcaacgtgcagatgaagccttaaataaagacaagattaagaggcttgaattggcagtttgtgatgagccctcagagccagaagaggaagaagagatggaggtaggcacaacttacgtaacagataagagtgaagaagataatgaaattgagagtgaagaggaagtacagcctaagacacaaggatctaggcgaagtagccgccaaataaaaaaacgaagggtcatatcagattctgagagtgacattggtggctctgatgtggaatttaagccagacactaaggaggaaggaagcagtgatgaaataagcagtggagtgggggatagtgagagtgaaggcctgaacagccctgtcaaagttgctcgaaagcggaagagaatggtgactggaaatggctctcttaaaaggaaaagctctaggaaggaaacgccctcagccaccaaacaagcaactagcatttcatcagaaaccaagaatactttgagagctttctctgcccctcaaaattctgaatcccaagcccacgttagtggaggtggtgatgacagtagtcgccctactgtttggtatcatgaaactttagaatggcttaaggaggaaaagagaagagatgagcacaggaggaggcctgatcaccccgattttgatgcatctacactctatgtgcctgaggatttcctcaattcttgtactcctgggatgaggaagtggtggcagattaagtctcagaactttgatcttgtcatctgttacaaggtggggaaattttatgagctgtaccacatggatgctcttattggagtcagtgaactggggctggtattcatgaaaggcaactgggcccattctggctttcctgaaattgcatttggccgttattcagattccctggtgcagaagggctataaagtagcacgagtggaacagactgagactccagaaatgatggaggcacgatgtagaaagatggcacatatatccaagtatgatagagtggtgaggagggagatctgtaggatcattaccaagggtacacagacttacagtgtgctggaaggtgatccctctgagaactacagtaagtatcttcttagcctcaaagaaaaagaggaagattcttctggccatactcgtgcatatggtgtgtgctttgttgatacttcactgggaaagtttttcataggtcagttttcagatgatcgccattgttcgagatttaggactctagtggcacactatcccccagtacaagttttatttgaaaaaggaaatctctcaaaggaaactaaaacaattctaaagagttcattgtcctgttctcttcaggaaggtctgatacccggctcccagttttgggatgcatccaaaactttgagaactctccttgaggaagaatattttagggaaaagctaagtgatggcattggggtgatgttaccccaggtgcttaaaggtatgacttcagagtctgattccattgggttgacaccaggagagaaaagtgaattggccctctctgctctaggtggttgtgtcttctacctcaaaaaatgccttattgatcaggagcttttatcaatggctaattttgaagaatatattcccttggattctgacacagtcagcactacaagatctggtgctatcttcaccaaagcctatcaacgaatggtgctagatgcagtgacattaaacaacttggagatttttctgaatggaacaaatggttctactgaaggaaccctactagagagggttgatacttgccatactccttttggtaagcggctcctaaagcaatggctttgtgccccactctgtaaccattatgctattaatgatcgtctagatgccatagaagacctcatggttgtgcctgacaaaatctccgaagttgtagagcttctaaagaagcttccagatcttgagaggctactcagtaaaattcataatgttgggtctcccctgaagagtcagaaccacccagacagcagggctataatgtatgaagaaactacatacagcaagaagaagattattgattttctttctgctctggaaggattcaaagtaatgtgtaaaattatagggatcatggaagaagttgctgatggttttaagtctaaaatccttaagcaggtcatctctctgcagacaaaaaatcctgaaggtcgttttcctgatttgactgtagaattgaaccgatgggatacagcctttgaccatgaaaaggctcgaaagactggacttattactcccaaagcaggctttgactctgattatgaccaagctcttgctgacataagagaaaatgaacagagcctcctggaatacctagagaaacagcgcaacagaattggctgtaggaccatagtctattgggggattggtaggaaccgttaccagctggaaattcctgagaatttcaccactcgcaatttgccagaagaatacgagttgaaatctaccaagaagggctgtaaacgatactggaccaaaactattgaaaagaagttggctaatctcataaatgctgaagaacggagggatgtatcattgaaggactgcatgcggcgactgttctataactttgataaaaattacaaggactggcagtctgctgtagagtgtatcgcagtgttggatgttttactgtgcctggctaactatagtcgagggggtgatggtcctatgtgtcgcccagtaattctgttgccggaagataccccccccttcttagagcttaaaggatcacgccatccttgcattacgaagactttttttggagatgattttattcctaatgacattctaataggctgtgaggaagaggagcaggaaaatggcaaagcctattgtgtgcttgttactggaccaaatatggggggcaagtctacgcttatgagacaggctggcttattagctgtaatggcccagatgggttgttacgtccctgctgaagtgtgcaggctcacaccaattgatagagtgtttactagacttggtgcctcagacagaataatgtcaggtgaaagtacattttttgttgaattaagtgaaactgccagcatactcatgcatgcaacagcacattctctggtgcttgtggatgaattaggaagaggtactgcaacatttgatgggacggcaatagcaaatgcagttgttaaagaacttgctgagactataaaatgtcgtacattattttcaactcactaccattcattagtagaagattattctcaaaatgttgctgtgcgcctaggacatatggcatgcatggtagaaaatgaatgtgaagaccccagccaggagactattacgttcctctataaattcattaagggagcttgtcctaaaagctatggctttaatgcagcaaggcttgctaatctcccagaggaagttattcaaaagggacatagaaaagcaagagaatttgagaagatgaatcagtcactacgattatttcgggaagtttgcctggctagtgaaaggtcaactgtagatgctgaagctgtccataaattgctgactttgattaaggaattatag

SEQ ID NO: 6 - DNA, 2811 bp, Homo sapiens
atgctgaggcctgagatctcatcaacctcgccttctgccccggcggtttccccgtcgtcgggagaaacccgctcacctcagggtccccgctacaatttcggactccaggagactccacagagccgcccttcggtccaggtggtctctgcatccacctgtcctggcacgtcaggagctgcgggcgaccggagcagcagcagcagcagccttccctgccccgcgccaaactcccggccagctcaaggttcatactttggaaacaaaagagcttatgcagaaaacacagttgcatcaaattttacttttggtgcaagctcatcttctgcacgagatactaattatcctcaaacacttaaaactccattgtctactggaaatcctcagagatcaggttataagagctggacaccacaagtgggatattcagcttcatcctcatctgcgatttctgcacactccccatcagttattgtagctgttgtagaagggagaggacttgccagaggtgaaataggaatggcaagtattgatttaaaaaacccccaaattatactatcccagtttgcagacaacacaacatatgcaaaggtgatcactaaacttaaaattttatcacctttggaaataataatgtcaaatactgcttgtgctgtggggaattccaccaagttgttcactctgatcacagaaaatttcaagaatgttaatttcactactatccaaaggaaatacttcaatgaaacaaaaggattagagtacattgaacagttatgcatagcagaattcagcactgtcctaatggaggttcagtccaagtattactgccttgcagctgttgcagctttgttaaaatatgttgaatttattcaaaattcagtttatgcaccaaaatcactgaagatttgtttccagggtagtgaacagacagccatgatagattcatcatcagcccaaaaccttgaattgttaattaataatcaagactataggaataatcacactctctttggtgttctaaattatactaagactcctggagggagtagacgacttcgttctaatatattagagcctctagttgatattgaaaccattaacatgagattagattgtgttcaagaactacttcaagatgaggaactattttttggacttcaatcagttatatcaagatttcttgatacagagcagcttctttctgttttagtccaaattccaaagcaagacacggtcaatgctgctgaatcaaagataacaaatttaatatacttaaaacataccttggaacttgtggatcctttaaagattgctatgaagaactgtaacacacctttattaagagcttactatggttccttggaagacaagaggtttggaatcatacttgaaaagattaaaacagtaattaatgatgatgcaagatacatgaaaggatgcctaaacatgaggactcagaagtgctatgcagtgaggtctaacataaatgaatttcttgacatagcaagaagaacatacacagagattgtagatgacatagcaggaatgatatcacaacttggagaaaaatatagtctacctttaaggacaagttttagctctgctcgaggatttttcatccagatgactacagattgtatagccctacctagtgatcaacttccttcagaatttattaagatttctaaagtgaaaaattcttacagctttacatcagcagatttaattaaaatgaatgaaagatgccaagaatctttgagagaaatctatcacatgacttatatgatagtgtgcaaactgcttagtgagatttatgaacatattcattgcttatataaactatctgacactgtgtcaatgctggatatgctactgtcatttgctcatgcctgcactctttctgactatgttcgaccagaatttactgatactttagcaatcaaacagggatggcatcctattcttgaaaaaatatctgcggaaaaacctattgccaacaatacctatgttacagaagggagtaattttttgatcataactggaccaaacatgagtggaaaatccacatatttaaaacagattgctctttgtcagattatggcccagattggatcatatgttccagcagaatattcttcctttagaattgctaaacagatttttacaagaattagtactgatgatgatatcgaaacaaattcatcaacatttatgaaagaaatgaaagagatagcatatattctacataatgctaatgacaaatcgctcatattaattgatgaacttggcagaggtactaatacggaagaaggtattggcatttgttatgctgtttgtgaatatctactgagcttaaaggcatttacactgtttgctacacatttcctggaactatgccatattgatgccctgtatcctaatgtagaaaacatgcattttgaagttcaacatgtaaagaatacctcaagaaataaagaagcaattttgtatacctacaaactttctaagggactcacagaagagaaaaattatggattaaaagctgcagaggtgtcatcacttccaccatcaattgtcttggatgccaaggaaatcacaactcaaattacgagacaaattttgcaaaaccaaaggagtacccctgagatggaaagacagagagctgtgtaccatctagccactaggcttgttcaaactgctcgaaactctcaattggatccagacagtttacgaatatatttaagtaacctcaagaagaagtacaaagaagattttcccaggactgaacaagttccagaaaagactgaagaataa

SEQ ID NO: 7 - DNA, 2271 bp, Homo sapiens
atgtcgttcgtggcaggggttattcggcggctggacgagacagtggtgaaccgcatcgcggcgggggaagttatccagcggccagctaatgctatcaaagagatgattgagaactgtttagatgcaaaatccacaagtattcaagtgattgttaaagagggaggcctgaagttgattcagatccaagacaatggcaccgggatcaggaaagaagatctggatattgtatgtgaaaggttcactactagtaaactgcagtcctttgaggatttagccagtatttctacctatggctttcgaggtgaggctttggccagcataagccatgtggctcatgttactattacaacgaaaacagctgatggaaagtgtgcatacagagcaagttactcagatggaaaactgaaagcccctcctaaaccatgtgctggcaatcaagggacccagatcacggtggaggaccttttttacaacatagccacgaggagaaaagctttaaaaaatccaagtgaagaatatgggaaaattttggaagttgttggcaggtattcagtacacaatgcaggcattagtttctcagttaaaaaacaaggagagacagtagctgatgttaggacactacccaatgcctcaaccgtggacaatattcgctccgtctttggaaatgctgttagtcgagaactgatagaaattggatgtgaggataaaaccctagccttcaaaatgaatggttacatatccaatgcaaactactcagtgaagaagtgcatcttcttactcttcatcaaccatcgtctggtagaatcaacttccttgagaaaagccatagaaacagtgtatgcagcctatttgcccaaaaacacacacccattcctgtacctcagtttagaaatcagtccccagaatgtggatgttaatgtgcaccccacaaagcatgaagttcacttcctgcacgaggagagcatcctggagcgggtgcagcagcacatcgagagcaagctcctgggctccaattcctccaggatgtacttcacccagactttgctaccaggacttgctggcccctctggggagatggttaaatccacaacaagtctgacctcgtcttctacttctggaagtagtgataaggtctatgcccaccagatggttcgtacagattcccgggaacagaagcttgatgcatttctgcagcctctgagcaaacccctgtccagtcagccccaggccattgtcacagaggataagacagatatttctagtggcagggctaggcagcaagatgaggagatgcttgaactcccagcccctgctgaagtggctgccaaaaatcagagcttggagggggatacaacaaaggggacttcagaaatgtcagagaagagaggacctacttccagcaaccccagaaagagacatcgggaagattctgatgtggaaatggtggaagatgattcccgaaaggaaatgactgcagcttgtaccccccggagaaggatcattaacctcactagtgttttgagtctccaggaagaaattaatgagcagggacatgaggttctccgggagatgttgcataaccactccttcgtgggctgtgtgaatcctcagtgggccttggcacagcatcaaaccaagttataccttctcaacaccaccaagcttagtgaagaactgttctaccagatactcatttatgattttgccaattttggtgttctcaggttatcggagccagcaccgctctttgaccttgccatgcttgccttagatagtccagagagtggctggacagaggaagatggtcccaaagaaggacttgctgaatacattgttgagtttctgaagaagaaggctgagatgcttgcagactatttctctttggaaattgatgaggaagggaacctgattggattaccccttctgattgacaactatgtgccccctttggagggactgcctatcttcattcttcgactagccactgaggtgaattgggacgaagaaaaggaatgttttgaaagcctcagtaaagaatgcgctatgttctattccatccggaagcagtacatatctgaggagtcgaccctctcaggccagcagagtgaagtgcctggctccattccaaactcctggaagtggactgtggaacacattgtctataaagccttgcgctcacacattctgcctcctaaacatttcacagaagatggaaatatcctgcagcttgctaacctgcctgatctatacaaagtctttgagaggtgttaa

SEQ ID NO: 8 - DNA, 4290 bp, Homo sapiens
atgatcaagtgcttgtcagttgaagtacaagccaaattgcgttctggtttggccataagctccttgggccaatgtgttgaggaacttgccctcaacagtattgatgctgaagcaaaatgtgtggctgtcagggtgaatatggaaaccttccaagttcaagtgatagacaatggatttgggatggggagtgatgatgtagagaaagtgggaaatcgttatttcaccagtaaatgccactcggtacaggacttggagaatccaaggttttatggtttccgaggagaggccttggcaaatattgctgacatggccagtgctgtggaaatttcgtccaagaaaaacaggacaatgaaaacttttgtgaaactgtttcagagtggaaaagccctgaaagcttgtgaagctgatgtgactagagcaagcgctgggactactgtaacagtgtataacctattttaccagcttcctgtaaggaggaaatgcatggaccctagactggagtttgagaaggttaggcagagaatagaagctctctcactcatgcacccttccatttctttctctttgagaaatgatgtttctggttccatggttcttcagctccctaaaaccaaagacgtatgttcccgattttgtcaaatttatggattgggaaagtcccaaaagctaagagaaataagttttaaatataaagagtttgagcttagtggctatatcagctctgaagcacattacaacaagaatatgcagtttttgtttgtgaacaaaagactagttttaaggacaaagctacataaactcattgactttttattaaggaaagaaagtattatatgcaagccaaagaatggtcccaccagtaggcaaatgaattcaagtcttcggcaccggtctaccccagaactctatggcatatatgtaattaatgtgcagtgccaattctgtgagtatgatgtgtgcatggagccagccaaaactctgattgaatttcagaactgggacactctcttgttttgcattcaggaaggagtgaaaatgtttttaaagcaagaaaaattatttgtggaattatcaggtgaggatattaaggaatttagtgaagataatggttttagtttatttgatgctactcttcagaagcgtgtgacttccgatgagaggagcaatttccaggaagcatgtaataatattttagattcctatgagatgtttaatttgcagtcaaaagctgtgaaaagaaaaactactgcagaaaacgtaaacacacagagttctagggattcagaagctaccagaaaaaatacaaatgatgcatttttgtacatttatgaatcaggtggtccaggccatagcaaaatgacagagccatctttacaaaacaaagacagctcttgctcagaatcaaagatgttagaacaagagacaattgtagcatcagaagctggtgaaaatgagaaacataaaaaatctttcctggaacgtagctctttagaaaatccgtgtggaaccagtttagaaatgtttttaagcccttttcagacaccatgtcactttgaggagagtgggcaggatctagaaatatggaaagaaagtactactgttaatggcatggctgccaacatcttgaaaaataatagaattcagaatcaaccaaagagatttaaagatgctactgaagtgggatgccagcctctgccttttgcaacaacattatggggagtacatagtgctcagacagagaaagagaaaaaaaaagaatctagcaattgtggaagaagaaatgtttttagttatgggcgagttaaattatgttccactggctttataactcatgtagtacaaaatgaaaaaactaaatcaactgaaacagaacattcatttaaaaattatgttagacctggtcccacacgtgcccaagaaacatttggaaatagaacacgtcattcagttgaaactccagacatcaaagatttagccagcactttaagtaaagaatctggtcaattgcccaacaaaaaaaattgcagaacgaatataagttatgggctagagaatgaacctacagcaacttatacaatgttttctgcttttcaggaaggtagcaaaaaatcacaaacagattgcatattatctgatacatccccctctttcccctggtatagacacgtttccaatgatagtaggaaaacagataaattaattggtttctccaaaccaatcgtccgtaagaagctaagcttgagttcacagctaggatctttagagaagtttaagaggcaatatgggaaggttgaaaatcctctggatacagaagtagaggaaagtaatggagtcactaccaatctcagtcttcaagttgaacctgacattctgctgaaggacaagaaccgcttagagaactctgatgtttgtaaaatcactactatggagcatagtgattcagatagtagttgtcaaccagcaagccacatccttgactcagagaagtttccattctccaaggatgaagattgtttagaacaacagatgcctagtttgagagaaagtcctatgaccctgaaggagttatctctctttaatagaaaacctttggaccttgagaagtcatctgaatcactagcctctaaattatccagactgaagggttccgaaagagaaactcaaacaatggggatgatgagtcgttttaatgaacttccaaattcagattccagtaggaaagacagcaagttgtgcagtgtgttaacacaagatttttgtatgttatttaacaacaagcatgaaaaaacagagaatggtgtcatcccaacatcagattctgccacacaggataattcctttaataaaaatagtaaaacacattctaacagcaatacaacagagaactgtgtgatatcagaaactcctttggtattgccctataataattctaaagttaccggtaaagattcagatgttcttatcagagcctcagaacaacagataggaagtcttgactctcccagtggaatgttaatgaatccggtagaagatgccacaggtgaccaaaatggaatttgttttcagagtgaggaatctaaagcaagagcttgttctgaaactgaagagtcaaacacgtgttgttcagattggcagcggcatttcgatgtagccctgggaagaatggtttatgtcaacaaaatgactggactcagcacattcattgccccaactgaggacattcaggctgcttgtactaaagacctgacaactgtggctgtggatgttgtacttgagaatgggtctcagtacaggtgtcaaccttttagaagcgaccttgttcttcctttccttccgagagctcgagcagagaggactgtgatgagacaggataacagagatactgtggatgatactgttagtagcgaatcgcttcagtctttgttctcagaatgggacaatccagtatttgcccgttatccagaggttgctgttgatgtaagcagtggccaggctgagagcttagcagttaaaattcacaacatcttgtatccctatcgtttcaccaaaggaatgattcattcaatgcaggttctccagcaagtagataacaagtttattgcctgtttgatgagcactaagactgaagagaatggcgaggcagattcctacgagaagcaacaggcacaaggctctggtcggaaaaaattactgtcttctactctaattcctccgctagagataacagtgacagaggaacaaaggagactcttatggtgttaccacaaaaatctggaagatctgggccttgaatttgtatttccagacactagtgattctctggtccttgtgggaaaagtaccactatgttttgtggaaagagaagccaatgaacttcggagaggaagatctactgtgaccaagagtattgtggaggaatttatccgagaacaactggagctactccagaccaccggaggcatccaagggacattgccactgactgtccagaaggtgttggcatcccaagcctgccatggggccattaagtttaatgatggcctgagcttacaggaaagttgccgccttattgaagctctgtcctcatgccagctgccattccagtgtgctcacgggagaccttctatgctgccgttagctgacatagaccacttggaacaggaaaaacagattaaacccaacctcactaaacttcgcaaaatggcccaggcctggcgtctctttggaaaagcagagtgtgatacaaggcagagcctgcagcagtccatgcctccctgtgagccaccatga

SEQ ID NO: 9 - DNA, 2799 bp, Homo sapiens
atgaaacaattgcctgcggcaacagttcgactcctttcaagttctcagatcatcacttcggtggtcagtgttgtaaaagagcttattgaaaactccttggatgctggtgccacaagcgtagatgttaaactggagaactatggatttgataaaattgaggtgcgagataacggggagggtatcaaggctgttgatgcacctgtaatggcaatgaagtactacacctcaaaaataaatagtcatgaagatcttgaaaatttgacaacttacggttttcgtggagaagccttggggtcaatttgttgtatagctgaggttttaattacaacaagaacggctgctgataattttagcacccagtatgttttagatggcagtggccacatactttctcagaaaccttcacatcttggtcaaggtacaactgtaactgctttaagattatttaagaatctacctgtaagaaagcagttttactcaactgcaaaaaaatgtaaagatgaaataaaaaagatccaagatctcctcatgagctttggtatccttaaacctgacttaaggattgtctttgtacataacaaggcagttatttggcagaaaagcagagtatcagatcacaagatggctctcatgtcagttctggggactgctgttatgaacaatatggaatcctttcagtaccactctgaagaatctcagatttatctcagtggatttcttccaaagtgtgatgcagaccactctttcactagtctttcaacaccagaaagaagtttcatcttcataaacagtcgaccagtacatcaaaaagatatcttaaagttaatccgacatcattacaatctgaaatgcctaaaggaatctactcgtttgtatcctgttttctttctgaaaatcgatgttcctacagctgatgttgatgtaaatttaacaccagataaaagccaagtattattacaaaataaggaatctgttttaattgctcttgaaaatctgatgacgacttgttatggaccattacctagtacaaattcttatgaaaataataaaacagatgtttccgcagctgacatcgttcttagtaaaacagcagaaacagatgtgctttttaataaagtggaatcatctggaaagaattattcaaatgttgatacttcagtcattccattccaaaatgatatgcataatgatgaatctggaaaaaacactgatgattgtttaaatcaccagataagtattggtgactttggttatggtcattgtagtagtgaaatttctaacattgataaaaacactaagaatgcatttcaggacatttcaatgagtaatgtatcatgggagaactctcagacggaatatagtaaaacttgttttataagttccgttaagcacacccagtcagaaaatggcaataaagaccatatagatgagagtggggaaaatgaggaagaagcaggtcttgaaaactcttcggaaatttctgcagatgagtggagcaggggaaatatacttaaaaattcagtgggagagaatattgaacctgtgaaaattttagtgcctgaaaaaagtttaccatgtaaagtaagtaataataattatccaatccctgaacaaatgaatcttaatgaagattcatgtaacaaaaaatcaaatgtaatagataataaatctggaaaagttacagcttatgatttacttagcaatcgagtaatcaagaaacccatgtcagcaagtgctctttttgttcaagatcatcgtcctcagtttctcatagaaaatcctaagactagtttagaggatgcaacactacaaattgaagaactgtggaagacattgagtgaagaggaaaaactgaaatatgaagagaaggctactaaagacttggaacgatacaatagtcaaatgaagagagccattgaacaggagtcacaaatgtcactaaaagatggcagaaaaaagataaaacccaccagcgcatggaatttggcccagaagcacaagttaaaaacctcattatctaatcaaccaaaacttgatgaactccttcagtcccaaattgaaaaaagaaggagtcaaaatattaaaatggtacagatccccttttctatgaaaaacttaaaaataaattttaagaaacaaaacaaagttgacttagaagagaaggatgaaccttgcttgatccacaatctcaggtttcctgatgcatggctaatgacatccaaaacagaggtaatgttattaaatccatatagagtagaagaagccctgctatttaaaagacttcttgagaatcataaacttcctgcagagccactggaaaagccaattatgttaacagagagtctttttaatggatctcattatttagacgttttatataaaatgacagcagatgaccaaagatacagtggatcaacttacctgtctgatcctcgtcttacagcgaatggtttcaagataaaattgataccaggagtttcaattactgaaaattacttggaaatagaaggaatggctaattgtctcccattctatggagtagcagatttaaaagaaattcttaatgctatattaaacagaaatgcaaaggaagtttatgaatgtagacctcgcaaagtgataagttatttagagggagaagcagtgcgtctatccagacaattacccatgtacttatcaaaagaggacatccaagacattatctacagaatgaagcaccagtttggaaatgaaattaaagagtgtgttcatggtcgcccattttttcatcatttaacctatcttccagaaactacatga

SEQ ID NO: 10 - DNA, 2589 bp, Homo sapiens
atggagcgagctgagagctcgagtacagaacctgctaaggccatcaaacctattgatcggaagtcagtccatcagatttgctctgggcaggtggtactgagtctaagcactgcggtaaaggagttagtagaaaacagtctggatgctggtgccactaatattgatctaaagcttaaggactatggagtggatcttattgaagtttcagacaatggatgtggggtagaagaagaaaacttcgaaggcttaactctgaaacatcacacatctaagattcaagagtttgccgacctaactcaggttgaaacttttggctttcggggggaagctctgagctcactttgtgcactgagcgatgtcaccatttctacctgccacgcatcggcgaaggttggaactcgactgatgtttgatcacaatgggaaaattatccagaaaaccccctacccccgccccagagggaccacagtcagcgtgcagcagttattttccacactacctgtgcgccataaggaatttcaaaggaatattaagaaggagtatgccaaaatggtccaggtcttacatgcatactgtatcatttcagcaggcatccgtgtaagttgcaccaatcagcttggacaaggaaaacgacagcctgtggtatgcacaggtggaagccccagcataaaggaaaatatcggctctgtgtttgggcagaagcagttgcaaagcctcattccttttgttcagctgccccctagtgactccgtgtgtgaagagtacggtttgagctgttcggatgctctgcataatcttttttacatctcaggtttcatttcacaatgcacgcatggagttggaaggagttcaacagacagacagtttttctttatcaaccggcggccttgtgacccagcaaaggtctgcagactcgtgaatgaggtctaccacatgtataatcgacaccagtatccatttgttgttcttaacatttctgttgattcagaatgcgttgatatcaatgttactccagataaaaggcaaattttgctacaagaggaaaagcttttgttggcagttttaaagacctctttgataggaatgtttgatagtgatgtcaacaagctaaatgtcagtcagcagccactgctggatgttgaaggtaacttaataaaaatgcatgcagcggatttggaaaagcccatggtagaaaagcaggatcaatccccttcattaaggactggagaagaaaaaaaagacgtgtccatttccagactgcgagaggccttttctcttcgtcacacaacagagaacaagcctcacagcccaaagactccagaaccaagaaggagccctctaggacagaaaaggggtatgctgtcttctagcacttcaggtgccatctctgacaaaggcgtcctgagacctcagaaagaggcagtgagttccagtcacggacccagtgaccctacggacagagcggaggtggagaaggactcggggcacggcagcacttccgtggattctgaggggttcagcatcccagacacgggcagtcactgcagcagcgagtatgcggccagctccccaggggacaggggctcgcaggaacatgtggactctcaggagaaagcgcctgaaactgacgactctttttcagatgtggactgccattcaaaccaggaagataccggatgtaaatttcgagttttgcctcagccaactaatctcgcaaccccaaacacaaagcgttttaaaaaagaagaaattctttccagttctgacatttgtcaaaagttagtaaatactcaggacatgtcagcctctcaggttgatgtagctgtgaaaattaataagaaagttgtgcccctggacttttctatgagttctttagctaaacgaataaagcagttacatcatgaagcacagcaaagtgaaggggaacagaattacaggaagtttagggcaaagatttgtcctggagaaaatcaagcagccgaagatgaactaagaaaagagataagtaaaacgatgtttgcagaaatggaaatcattggtcagtttaacctgggatttataataaccaaactgaatgaggatatcttcatagtggaccagcatgccacggacgagaagtataacttcgagatgctgcagcagcacaccgtgctccaggggcagaggctcatagcacctcagactctcaacttaactgctgttaatgaagctgttctgatagaaaatctggaaatatttagaaagaatggctttgattttgttatcgatgaaaatgctccagtcactgaaagggctaaactgatttccttgccaactagtaaaaactggaccttcggaccccaggacgtcgatgaactgatcttcatgctgagcgacagccctggggtcatgtgccggccttcccgagtcaagcagatgtttgcctccagagcctgccggaagtcggtgatgattgggactgctcttaacacaagcgagatgaagaaactgatcacccacatgggggagatggaccacccctggaactgtccccatggaaggccaaccatgagacacatcgccaacctgggtgtcatttctcagaactga

SEQ ID NO: 11 - protein, 756 aa, Homo sapiens [sequence omitted]

SEQ ID NO: 12 - protein, 760 aa, Mus musculus
MAFVAGVIRRLDETVVNRIAAGEVIQRPANAIKEMIENCLDAKSTNIQVVVKEGGLKLIQIQDNGTGIRKEDLDIVCERFTTSKLQTFEDLASISTYGFRGEALASISHVAHVTITTKTADGKCAYRASYSDGKLQAPPKPCAGNQGTLITVEDLFYNIITRRKALKNPSEEYGKILEVVGRYSIHNSGISFSVKKQGETVSDVRTLPNATTVDNIRSIFGNAVSRELIEVGCEDKTLAFKMNGYISNANYSVKKCIFLLFINHRLVESAALRKAIETVYAAYLPKNTHPFLYLSLEISPQNVDVNVHPTKHEVHFLHEESILQRVQQHIESKLLGSNSSRMYFTQTLLPGLAGPSGEAARPTTGVASSSTSGSGDKVYAYQMVRTDSRDQKLDAFLQPVSSLVPSQPQDPAPVRGARTEGSPERATREDEEMLALPAPAEAAAESENLERESLMETSDAAQKAAPTSSPGSSRKRHREDSDVEMVENASGKEMTAACYPRRRIINLTSVLSLQEEISERCHETLREILRNHSFVGCVNPQWALAQHQTKLYLLNTTKLSEELFYQILIYDFANFGVLRLSEPAPLFDLAMLALDSPESGWTEDDGPKEGLAEYIVEFLKKKAEMLADYFSVEIDEEGNLIGLPLLIDSYVPPLEGLPIFILRLATEVNWDEEKECFESLSKECAMFYSIRKQYILEESTLSGQQSDMPGSTSKPWKWTVEHIIYKAFRSHLLPPKHFTEDGNVLQLANLPDLYKVFERC

SEQ ID NO: 13 - protein, 757 aa, Rattus norvegicus
MSFVAGVIRRLDETVVNRIAAGEVIQRPANAIKEMTENCLDAKSTNIQVIVREGGLKLIQIQDNGTGIRKEDLDIVCERFTTSKLQTFEDLAMISTYGFRGEALASISHVAHVTITTKTADGKCAYRASYSDGKLQAPPKPCAGNQGTLITVEDLFYNIITRKKALKNPSEEYGKILEVVGRYSIHNSGISFSVKKQGETVSDVRTLPNATTVDNIRSIFGNAVSRELIEVGCEDKTLAFKMNGYISNANYSVKKCIFLLFINHRLVESAALKKAIEAVYAAYLPKNTHPFLYLILEISPQNVDVNVHPTKHEVHFLHEESILERVQQHIESKLLGSNSSRMYFTQTLLPGLAGPSGEAVKSTTGIASSSTSGSGDKVHAYQMVRTDSRDQKLDAFMQPVSRRLPSQPQDPVPGNRTEGSPEKAMQKDQEISELPAPMEAAADSASLERESVIGASEVVAPQRHPSSPGSSRKRHPEDSDVEMMENDSRKEMTAACYPRRRIINLTSVLSLQEEINDRGHETLREMLRNHTFVGCVNPQWALAQHQTKLYLLNTTKLSEELFYQILIYDFANFGVLRLPEPAPLFDFAMLALDSPESGWTEEDGPKEGLAEYIVEFLKKKAKMLADYFSVEIDEEGNLIGLPLLIDSYVPPLEGLPIFILRLATEVNWDEEECFESLSKECAVFYSIRKQYILEESALSGQQSDMPGSPSKPWKWTVEHIIYKAFRSHLLPPKHFTEDGNVLQLANLPDLCKVFERC

SEQ ID NO: 14 - protein, 664 aa, Drosophila melanogaster
MAEYLQPGVIRKLDEVVVNRIAAGEIIQRPANALKELLENSLDAQSTHIQVQVKAGGLKLLQIQDNGTGIRREDLAIVCERFTTSKLTRFEDLSQIATFGFRGEALASISHVAHLSIQTKTAKEKCGYKATYADGKLQGQPKPCAGNQGTIICIEDLFYNMPQRRQALRSPAEEFQRLSEVLARYAVHNPRVGFTLRKQGDAQPALRTPVASSRSENIRIIYGAAISKELLEFSHRDEVYKFEAECLITQVNYSAKKCQMLLFINQRLVESTALRTSVDSIYATYLPRGHHPFVYMSLTLPPQNLDVNVHPTKHEVHFLYQEEIVDSIKQQVEARLLGSNATRTFYKQLRLPGAPDLDETQLADKTQRIYPKEMVRTDSTEQKLDKFLAPLVKSDSGVSSSSSQEASRLPEESFRVTAAKKSREVRLSSVLDMRKRVERQCSVQLRSTLKNLVYVGCVDERRALFQHETRLYMCNTRSFSEELFYQRMIYEFQNCSEITISPPLPLKELLILSLESEAAGWTPEDGDKAELADGAADILLKKAPIMREYFGLRISEDGMLESLPSLLHQHRPCVAHLPVYLLRLATEVDWEQETRCFETFCRETARFYAQLDWREGATAGFSRWTMEHVLFPAFKKYLLPPPRIKDQIYELTNLPTLYKVFERC

SEQ ID NO: 15 - protein, 769 aa, Saccharomyces cerevisiae
MSLRIKALDASVVNKIAAGEIIISPVNALKEMMENSIDANATMIDILVKEGGIKVLQITDNGSGINKADLPILCERFTTSKLQKFEDLSQIQTYGFRGEALASISHVARVTVTTKVKEDRCAWRVSYAEGKMLESPKPVAGKDGTTILVEDLFFNIPSRLRALRSHNDEYSKILDVVGRYAIHSKDIGFSCKKFGDSNYSLSVKPSYTVQDRIRTVFNKSVASNLITFHISKVEDLNLESVDGKVCNLNFISKKSISLIFFINNRLVTCDLLRRALNSVYSNYLPKGFRPFIYLGIVIDPAAVDVNVHPTKREVRFLSQDEIIEKIANQLHAELSAIDTSRTFKASSISTNKPESLIPFNDTIESDRNRKSLRQAQVVENSYTTANSQLRKAKRQENKLVRIDASQAKITSFLSSSQQFNFEGSSTKRQLSEPKVTNVSHSQEAEKLTLNESEQPRDANTINDNDLKDQPKKKQKLGDYKVPSIADDEKNALPISKDGYIRVPKERVNVNLTSIKKLREKVDDSIHRELTDIFANLNYVGVVDEERRLAAIQHDLKLFLIDYGSVCYELFYQIGLTDFANFGKINLQSTNVSDDIVLYNLLSEFDELNDDASKEKIISKIWDMSSMLNEYYSIELVNDGLDNDLKSVKLKSLPLLLKGYIPSLVKLPFFIYRLGKEVDWEDEQECLDGILREIALLYIPDMVPKVDTLDASLSEDEKAQFINRKEHISSLLEHVLFPCIKRRFLAPRHILKDVVEIANLPDLYKVFERC

SEQ ID NO: 16 - protein, 684 aa, Schizosaccharomyces pombe
MDVNSRAKIRPLDQLVINKIAAGEIIERPENAIKELIENSLDAGSTSIDVLLKDGGLKLLQITDNGSGIQYDDLPYLCQRFSTSKIDNFNDLQHLQTFGFRGEALASISHVAKVTVVTKLSSDIHAWKAFYVDGALAPISPGMSPAPQPCAGKQGTVITAEDLFYNVRSRKSALKNGSEEFRRIMILVQKYAIHNDQVSFNCKKVGDTVASLSLSSRLSKADKIRHIYGPRVASHLRDFSLGEGQSSIVGFSANGFISNADFQDKKSNLILFINNRLVESVELRHALEETYAKYLHKGASYFVYLSLNMSPEQLDVNVHPSKRIVHFLYDQEIATSICDKLGEILERTDTERSYPLQAMIPSISNTKNAESSSQKAVRTYENYLVRTDPRERSIKSMLSDNFLQRSSNNYDNEIIEKVDSANSNKNATNDIKDLQTEEIVEEGNSIDLESIKSLQKQVINSMHVLATNILTEHKYVGLVCPTRRIAAVQHNIGLYVVDYGKLSYHLFYQICLTEFGNYGEFVLETPLSISDLFEIVNGDEDKSESEKFTRLLVSRRDMLKDYFSISVTSGGLLTAVPMLSPKYHPPFEQLPLLISSLTPKFFDWLDEKSCLNGIMKAIAKFYVPLPLSYEESDVKSIRSLESCLEDYLFPEFRRRVICPKKVFEEKCIYQITSLPRLYNVFERC

SEQ ID NO: 17 - protein, 737 aa, Arabidopsis thaliana
MIDDSSLTAEMEEEESPATTIVPREPPKIQRLEESVVNRIAAGEVIQRPVSAVKELVENSLDADSSSISVVVKDGGLKLIQVSDDGHGIRREDLPILCERHTTSKLTKFEDLFSLSSMGFRGEALASMTYVAHVTVTTITKGQIHGYRVSYRDGVMEHEPKACAAVKGTQIMVENLFYNMIARRKTLQNSADDYGKIVDLLSRMAIHYNNVSFSCRKHGAVKADVHSVVSPSRLDSIRSVYGVSVAKNLMKVEVSSCDSSGCTFDMEGFISNSNYVAKKTILVLFINDRLVECSALKRAIEIVYAATLPKASKPFVYMSINLPREHVDINIHPTKKEVSLLNQEIIIEMIQSEVEVKLRNANDTRTFQEQKVEYIQSTLTSQKSDSPVSQKPSGQKTQKVPVNKMVRTDSSDPAGRLHAFLQPKPQSLPDKVSSLSVVRSSVRQRRNPKETADLSSVQELIAGVDSCCHPGMLETVRNCTYVGMADDVFALVQYNTHLYLANVVNLSKELMYQQTLRRFAHFNAIQLSDPAPLSELILLALKEEDLDPGNDTKDDLKERIAEMNTELLKEKAEMLEEYFSVHIDSSANLSRLPVILDQYTPDMDRVPEFLLCLGNDVEWEDEKSCFQGVSAAIGNFYAMHPPLLPNPSGDGIQFYSKRGESSQEKSDLEGNVDMEDNLDQDLLSDAENAWAQREWSIQHVLFPSMRLFLKPPASMASNGTFVKVASLEKLYKIFERC

SEQ ID NO: 18 - protein, 659 aa, Caenorhabditis elegans
LASLSHVAKVNIVSKRADAKCAYQANFLDGKMTADTKPAAGKNGTCITATDLFYNLPTRRNKMTTHGEEAKMVNDTLLRFAIHRPDVSFALRQNQAGDFRTKGDGNFRDVVCNLLGRDVADTILPLSLNSTRLKFTFTGHISKPIASATAAIAQNRKTSRSFFSVFINGRSVRCDILKHPIDEVLGARQLHAQFCALHLQIDETRIDVNVHPTKNSVIFLEKEEIIEEIRAYFEKVIGEIFGFEALDVEKPEEEQPDIENLVMIPMSQSLKSIEAIRKPDTKPEFKSSPSAWKSDKKRVDYMEVRTDAKERKIDEFVTRGGAVGPTTSNDDIFGGSGILKRARTEDSTGGEKEPEDLNTDFDDVSMVSLVSTADGRRLNESQDLGEDDDVDFEYGKTHREFHFESIEVLRKEIIANSSQSLREMFKTSTFVGSINVKQVLIQFGTSLYHLDFSTVLREFFYQISVFSFGNYGSYRLDEEPPAIIEILELLGELSTREPNYAAFEVFANVENRFAAEKLLAEHADLLHDYFAIKLDQLENGRLHITEIPSLVHYFVPQLEKLPFLIATLVLNVDYDDEQNTFRTICRAIGDLFTLDTNFITLDKKISAFSATPWKTLIKEVLMPLVKRKFIPPEHFKQAGVIRQLADSHDLYKVFERCGT

SEQ ID NO: 19 - protein, 669 aa, Staphylococcus aureus
MGKIKELQTSLANKIAAGEVVERPSSVVKELLENAIDAGATEISIEVEESGVQSIRVVDNGSGIEAEDLGLVFHRHATSKLDQDEDLFHIRTLGFRGEALASISSVAKVTLKTCTDNANGNEIYVENGEILNHKPAKAKKGTDILVESLFYNTPARLKYIKSLYTELGKITDIVNRMAMSHPDIRIALISDGKTMLSTNGSGRTNEVMAEIYGMKVARDLVHISGDTSDYHIEGFVAKPEHSRSNKHYISIFINGRYIKNFMLNKAILEGYHTLLTIGRFPICYINIEMDPILVDVNVHPTKLEVRLSKEEQLYQLIVSKIQEAFKDRILIPKNNLDYVPKKNKVLYSFEQQKIEFEQRQNTENNQEKTFSSEESNSKSFMAENQNDEIVIKEDSYNPFVTKTSESLITDDESSGYNNTREKDEDYFKKQQEILQEMDQTFDSNEDASVQNYENKASDDYYDVNDIKGTKSKDPKRRIPYMEIVGQVHGTYIIAQNEFGMYMIDQHAAQERIKYEYFRDKIGEVTNEVQDLLIPLTFHFSKDEQLVIDQYKNELQQVGIMLEHFGGHDYIVSSYPVWFPKDEVEEIIKDMIELILEEKKVDIKKLREDVAIMMSCKKSIKANHYLQKHEMSDLIDQLREAEDPFTCPHGRPIIINFSKYELEKLFKRVM

SEQ ID NO: 20 - protein, 615 aa, Escherichia coli
MPIQVLPPQLANQIAAGEVVERPASVVKELVENSLDAGATRIDIDIERGGAKLIRIRDNGCGIKKDELALALARHATSKIASLDDLEAIISLGFRGEALASISSVSRLTLTSRTAEQQEAWQAYAEGRDMNVTVKPAAHPVGTTLEVLDLFYNTPARRKFLRTEKTEFNHIDEIIRRIALARFDVTINLSHNGKIVRQYRAVPEGGQKERRLGAICGTAFLEQALAIEWQHGDLTLRGWVADPNHTTPALAEIQYCYVNGRMMRDRLINHAIRQACEDKLGADQQPAFVLYLEIDPHQVDVNVHPAKHEVRFHQSRLVHDFIYQGVLSVLQQQLETPLPLDDEPQPAPRSIPENRVAAGRNHFAEPAAREPVAPRYTPAPASGSRPAAPWPNAQPGYQKQQGEVYRQLLQTPAPMQKLKAPEPQEPALAANSQSFGRVLTIVHSDCALLERDGNISLLSLPVAERWLRQAQLTPGEAPVCAQPLLIPLRLKVSAEEKSALEKAQSALAELGIDFQSDAQHVTIRAVPLPLRQQNLQILIPELIGYLAKQSVFEPGNIAQWIARNLMSEHAQWSMAQAITLLADVERLCPQLVKTPPGGLLQSVDLHPAIKALKDE

SEQ ID NO: 21 - protein, 769 aa, Saccharomyces cerevisiae
MSLRIKALDASVVNKIAAGEIIISPVNALKEMMENSIDANSTMIDILVKEGGIKVLQITDNGSGINKADLPILCERFTTSKLQKFEDLSQIQTYGFRGEALASISHVARVTVTTKVKEDRCAWRVSYAEGKMLESPKPVAGKDGTTILVEDLFFNIPSRLRALRSHNDEYSKILDVVGRYAIHSKDIGFSCKKFGDSNYSLSVKPSYTVQDRIRTVFNKSVASNLITFHISKVEDLNLESVDGKVCNLNFISKKSISLIFFINNRLVTCDLLRRALNSVYSNYLPKGFRPFIYLGIVIDPAAVDVNVHPTKREVRFLSQDEIIEKIANQLHAELSAIDTSRTFKASSISTNKPESLIPFNDTIESDRNRKSLRQAQVVENSYTTANSQLRKAKRQENKLVRIDASQAKITSFLSSSQQFNFEGSSTKRQLSEPKVTNVSHSQEAEKLTLNESEQPRDANTINDNDLKDQPKKKQKLGDYKVPSIADDEKNALPISKDGYIRVPKERVNVNLTSIKKLREKVDDSIHRELTDIFANLNYVGVVDEERRLAAIQHDLKLFLIDYGSVCYELFYQIGLTDFANFGKINLQSTNVSDDIVLYNLLSEFDELNDDASKEKIISKIWDMSSMLNEYYSIELVNDGLDNDLKSVKLKSLPLLLKGYIPSLVKLPFFIYRLGKEVDWEDEQECLDGILREIALLYIPDMVPKVDTLDASLSEDEKAQFINRKEHISSLLEHVLFPCIKRRFLAPRHILKDVVEIANLPDLYKVFERC

SEQ ID NO: 22 - protein, 769 aa, Saccharomyces cerevisiae
MSLRIKALDASVVNKIAAGEIIISPVNALKEMMENSIDANFTMIDILVKEGGIKVLQITDNGSGINKADLPILCERFTTSKLQKFEDLSQIQTYGFRGEALASISHVARVTVTTKVKEDRCAWRVSYAEGKMLESPKPVAGKDGTTILVEDLFFNIPSRLRALRSHNDEYSKILDVVGRYAIHSKDIGFSCKKFGDSNYSLSVKPSYTVQDRIRTVFNKSVASNLITFHISKVEDLNLESVDGKVCNLNFISKKSISLIFFINNRLVTCDLLRRALNSVYSNYLPKGFRPFIYLGIVIDPAAVDVNVHPTKREVRFLSQDEIIEKIANQLHAELSAIDTSRTFKASSISTNKPESLIPFNDTIESDRNRKSLRQAQVVENSYTTANSQLRKAKRQENKLVRIDASQAKITSFLSSSQQFNFEGSSTKRQLSEPKVTNVSHSQEAEKLTLNESEQPRDANTINDNDLKDQPKKKQKLGDYKVPSIADDEKNALPISKDGYIRVPKERVNVNLTSIKKLREKVDDSIHRELTDIFANLNYVGVVDEERRLAAIQHDLKLFLIDYGSVCYELFYQIGLTDFANFGKINLQSTNVSDDIVLYNLLSEFDELNDDASKEKIISKIWDMSSMLNEYYSIELVNDGLDNDLKSVKLKSLPLLLKGYIPSLVKLPFFIYRLGKEVDWEDEQECLDGILREIALLYIPDMVPKVDTLDASLSEDEKAQFINRKEHISSLLEHVLFPCIKRRFLAPRHILKDVVEIANLPDLYKVFERC

SEQ ID NO: 23 - protein, 769 aa, Saccharomyces cerevisiae
MSLRIKALDASVVNKIAAGEIIISPVNALKEMMENSIDANATMIDILVKEGGIKVLQITDNGSRINKADLPILCERFTTSKLQKFEDLSQIQTYGFRGEALASISHVARVTVTTKVKEDRCAWRVSYAEGKMLESPKPVAGKDGTTILVEDLFFNIPSRLRALRSHNDEYSKILDVVGRYAIHSKDIGFSCKKFGDSNYSLSVKPSYTVQDRIRTVFNKSVASNLITFHISKVEDLNLESVDGKVCNLNFISKKSISLIFFINNRLVTCDLLRRALNSVYSNYLPKGFRPFIYLGIVIDPAAVDVNVHPTKREVRFLSQDEIIEKIANQLHAELSAIDTSRTFKASSISTNKPESLIPFNDTIESDRNRKSLRQAQVVENSYTTANSQLRKAKRQENKLVRIDASQAKITSFLSSSQQFNFEGSSTKRQLSEPKVTNVSHSQEAEKLTLNESEQPRDANTINDNDLKDQPKKKQKLGDYKVPSIADDEKNALPISKDGYIRVPKERVNVNLTSIKKLREKVDDSIHRELTDIFANLNYVGVVDEERRLAAIQHDLKLFLIDYGSVCYELFYQIGLTDFANFGKINLQSTNVSDDIVLYNLLSEFDELNDDASKEKIISKIWDMSSMLNEYYSIELVNDGLDNDLKSVKLKSLPLLLKGYIPSLVKLPFFIYRLGKEVDWEDEQECLDGILREIALLYIPDMVPKVDTLDASLSEDEKAQFINRKEHISSLLEHVLFPCIKRRFLAPRHILKDVVEIANLPDLYKVFERC

SEQ ID NO: 24 - protein, 769 aa, Saccharomyces cerevisiae
MSLRIKALDASVVNKIAAGEIIISPVNALKEMMENSIDANATMIDILVKEGGIKVLQITDNGSGNNKADLPILCERFTTSKLQKFEDLSQIQTYGFRGEALASISHVARVTVTTKVKEDRCAWRVSYAEGKMLESPKPVAGKDGTTILVEDLFFNIPSRLRALRSHNDEYSKILDVVGRYAIHSKDIGFSCKKFGDSNYSLSVKPSYTVQDRIRTVFNKSVASNLITFHISKVEDLNLESVDGKVCNLNFISKKSISLIFFINNRLVTCDLLRRALNSVYSNYLPKGFRPFIYLGIVIDPAAVDVNVHPTKREVRFLSQDEIIEKIANQLHAELSAIDTSRTFKASSISTNKPESLIPFNDTIESDRNRKSLRQAQVVENSYTTANSQLRKAKRQENKLVRIDASQAKITSFLSSSQQFNFEGSSTKRQLSEPKVTNVSHSQEAEKLTLNESEQPRDANTINDNDLKDQPKKKQKLGDYKVPSIADDEKNALPISKDGYIRVPKERVNVNLTSIKKLREKVDDSIHRELTDIFANLNYVGVVDEERRLAAIQHDLKLFLIDYGSVCYELFYQIGLTDFANFGKINLQSTNVSDDIVLYNLLSEFDELNDDASKEKIISKIWDMSSMLNEYYSIELVNDGLDNDLKSVKLKSLPLLLKGYIPSLVKLPFFIYRLGKEVDWEDEQECLDGILREIALLYIPDMVPKVDTLDASLSEDEKAQFINRKEHISSLLEHVLFPCIKRRFLAPRHILKDVVEIANLPDLYKVFERC

SEQ ID NO: 25 - protein, 769 aa, Saccharomyces cerevisiae
MSLRIKALDASVVNKIAAGEIIISPVNALKEMMENSIDANATMIDILVKEGGIKVLQITDNGSGINKADLPILCERFTTSKLQKFEDLSQIQTYGFRGKALASISHVARVTVTTKVKEDRCAWRVSYAEGKMLESPKPVAGKDGTTILVEDLFFNIPSRLRALRSHNDEYSKILDVVGRYAIHSKDIGFSCKKFGDSNYSLSVKPSYTVQDRIRTVFNKSVASNLITFHISKVEDLNLESVDGKVCNLNFISKKSISLIFFINNRLVTCDLLRRALNSVYSNYLPKGFRPFIYLGIVIDPAAVDVNVHPTKREVRFLSQDEIIEKIANQLHAELSAIDTSRTFKASSISTNKPESLIPFNDTIESDRNRKSLRQAQVVENSYTTANSQLRKAKRQENKLVRIDASQAKITSFLSSSQQFNFEGSSTKRQLSEPKVTNVSHSQEAEKLTLNESEQPRDANTINDNDLKDQPKKKQKLGDYKVPSIADDEKNALPISKDGYIRVPKERVNVNLTSIKKLREKVDDSIHRELTDIFANLNYVGVVDEERRLAAIQHDLKLFLIDYGSVCYELFYQIGLTDFANFGKINLQSTNVSDDIVLYNLLSEFDELNDDASKEKIISKIWDMSSMLNEYYSIELVNDGLDNDLKSVKLKSLPLLLKGYIPSLVKLPFFIYRLGKEVDWEDEQECLDGILREIALLYIPDMVPKVDTLDASLSEDEKAQFINRKEHISSLLEHVLFPCIKRRFLAPRHILKDVVEIANLPDLYKVFERC

SEQ ID NO: 26 - protein, 769 aa, Saccharomyces cerevisiae
MSLRIKALDASVVNKIAAGEIIISPVNALKEMMENSIDANATMIDILVKEGGIKVLQITDNGSGINKADLPILCERFTTSKLQKFEDLSQIQTYGFRGEALASRSHVARVTVTTKVKEDRCAWRVSYAEGKMLESPKPVAGKDGTTILVEDLFFNIPSRLRALRSHNDEYSKILDVVGRYAIHSKDIGFSCKKFGDSNYSLSVKPSYTVQDRIRTVFNKSVASNLITFHISKVEDLNLESVDGKVCNLNFISKKSISLIFFINNRLVTCDLLRRALNSVYSNYLPKGFRPFIYLGIVIDPAAVDVNVHPTKREVRFLSQDEIIEKIANQLHAELSAIDTSRTFKASSISTNKPESLIPFNDTIESDRNRKSLRQAQVVENSYTTANSQLRKAKRQENKLVRIDASQAKITSFLSSSQQFNFEGSSTKRQLSEPKVTNVSHSQEAEKLTLNESEQPRDANTINDNDLKDQPKKKQKLGDYKVPSIADDEKNALPISKDGYIRVPKERVNVNLTSIKKLREKVDDSIHRELTDIFANLNYVGVVDEERRLAAIQHDLKLFLIDYGSVCYELFYQIGLTDFANFGKINLQSTNVSDDIVLYNLLSEFDELNDDASKEKIISKIWDMSSMLNEYYSIELVNDGLDNDLKSVKLKSLPLLLKGYIPSLVKLPFFIYRLGKEVDWEDEQECLDGILREIALLYIPDMVPKVDTLDASLSEDEKAQFINRKEHISSLLEHVLFPCIKRRFLAPRHILKDVVEIANLPDLYKVFERC

SEQ ID NO: 27 - protein, 769 aa, Saccharomyces cerevisiae
MSLRIKALDASVVNKIAAGEIIISPVNALKEMMENSIDANATMIDILVKEGGIKVLQITDNGSGINKADLPILCERFTTSKLQKFEDLSQIQTYGFRGEALASISHVARVTVTRKVKEDRCAWRVSYAEGKMLESPKPVAGKDGTTILVEDLFFNIPSRLRALRSHNDEYSKILDVVGRYAIHSKDIGFSCKKFGDSNYSLSVKPSYTVQDRIRTVFNKSVASNLITFHISKVEDLNLESVDGKVCNLNFISKKSISLIFFINNRLVTCDLLRRALNSVYSNYLPKGFRPFIYLGIVIDPAAVDVNVHPTKREVRFLSQDEIIEKIANQLHAELSAIDTSRTFKASSISTNKPESLIPFNDTIESDRNRKSLRQAQVVENSYTTANSQLRKAKRQENKLVRIDASQAKITSFLSSSQQFNFEGSSTKRQLSEPKVTNVSHSQEAEKLTLNESEQPRDANTINDNDLKDQPKKKQKLGDYKVPSIADDEKNALPISKDGYIRVPKERVNVNLTSIKKLREKVDDSIHRELTDIFANLNYVGVVDEERRLAAIQHDLKLFLIDYGSVCYELFYQIGLTDFANFGKINLQSTNVSDDIVLYNLLSEFDELNDDASKEKIISKIWDMSSMLNEYYSIELVNDGLDNDLKSVKLKSLPLLLKGYIPSLVKLPFFIYRLGKEVDWEDEQECLDGILREIALLYIPDMVPKVDTLDASLSEDEKAQFINRKEHISSLLEHVLFPCIKRRFLAPRHILKDVVEIANLPDLYKVFERC

SEQ ID NO: 28 - protein, 769 aa, Saccharomyces cerevisiae
MSLRIKALDASVVNKIAAGEIIISPVNALKEMMENSIDANATMIDILVKEGGIKVLQITDNGSGINKADLPILCERFTTSKLQKFEDLSQIQTYGFRGEALASISHVARVTVTTKVKEDRCAWRVSYAEGKMLESPKPVAGKDGTTILVEDLFFNIPSRLRALRSHNDEYSKILDVVGRYAIHSKDIGFSCKKFGDSNYSLSVKPSYTVQDRICTVFNKSVASNLITFHISKVEDLNLESVDGKVCNLNFISKKSISLIFFINNRLVTCDLLRRALNSVYSNYLPKGFRPFIYLGIVIDPAAVDVNVHPTKREVRFLSQDEIIEKIANQLHAELSAIDTSRTFKASSISTNKPESLIPFNDTIESDRNRKSLRQAQVVENSYTTANSQLRKAKRQENKLVRIDASQAKITSFLSSSQQFNFEGSSTKRQLSEPKVTNVSHSQEAEKLTLNESEQPRDANTINDNDLKDQPKKKQKLGDYKVPSIADDEKNALPISKDGYIRVPKERVNVNLTSIKKLREKVDDSIHRELTDIFANLNYVGVVDEERRLAAIQHDLKLFLIDYGSVCYELFYQIGLTDFANFGKINLQSTNVSDDIVLYNLLSEFDELNDDASKEKIISKIWDMSSMLNEYYSIELVNDGLDNDLKSVKLKSLPLLLKGYIPSLVKLPFFIYRLGKEVDWEDEQECLDGILREIALLYIPDMVPKVDTLDASLSEDEKAQFINRKEHISSLLEHVLFPCIKRRFLAPRHILKDVVEIANLPDLYKVFERC

SEQ ID NO: 29 - protein, 769 aa, Saccharomyces cerevisiae
MSLRIKALDASVVNKIAAGEIIISPVNALKEMMENSIDANATMIDILVKEGGIKVLQITDNGSGINKADLPILCERFTTSKLQKFEDLSQIQTYGFRGEALASISHVARVTVTTKVKEDRCAWRVSYAEGKMLESPKPVAGKDGTTILVEDLFFNIPSRLRALRSHNDEYSKILDVVGRYAIHSKDIGFSCKKFGDSNYSLSVKPSYTVQDRIRTIFNKSVASNLITFHISKVEDLNLESVDGKVCNLNFISKKSISLIFFINNRLVTCDLLRRALNSVYSNYLPKGFRPFIYLGIVIDPAAVDVNVHPTKREVRFLSQDEIIEKIANQLHAELSAIDTSRTFKASSISTNKPESLIPFNDTIESDRNRKSLRQAQVVENSYTTANSQLRKAKRQENKLVRIDASQAKITSFLSSSQQFNFEGSSTKRQLSEPKVTNVSHSQEAEKLTLNESEQPRDANTINDNDLKDQPKKKQKLGDYKVPSIADDEKNALPISKDGYIRVPKERVNVNLTSIKKLREKVDDSIHRELTDIFANLNYVGVVDEERRLAAIQHDLKLFLIDYGSVCYELFYQIGLTDFANFGKINLQSTNVSDDIVLYNLLSEFDELNDDASKEKIISKIWDMSSMLNEYYSIELVNDGLDNDLKSVKLKSLPLLLKGYIPSLVKLPFFIYRLGKEVDWEDEQECLDGILREIALLYIPDMVPKVDTLDASLSEDEKAQFINRKEHISSLLEHVLFPCIKRRFLAPRHILKDVVEIANLPDLYKVFERC

SEQ ID NO: 30 - protein, 769 aa, Saccharomyces cerevisiae
MSLRIKALDASVVNKIAAGEIIISPVNALKEMMENSIDANATMIDILVKEGGIKVLQITDNGSGINKADLPILCERFTTSKLQKFEDLSQIQTYGFRGEALASISHVARVTVTTKVKEDRCAWRVSYAEGKMLESPKPVAGKDGTTILVEDLFFNIPSRLRALRSHNDEYSKILDVVGRYAIHSKDIGFSCKKFGDSNYSLSVKPSYTVQDRIRTVFNKSVASNLITFHISKVEDLNLESVDGKVCNLNFISKKSISLIFFINNCLVTCDLLRRALNSVYSNYLPKGFRPFIYLGIVIDPAAVDVNVHPTKREVRFLSQDEIIEKIANQLHAELSAIDTSRTFKASSISTNKPESLIPFNDTIESDRNRKSLRQAQVVENSYTTANSQLRKAKRQENKLVRIDASQAKITSFLSSSQQFNFEGSSTKRQLSEPKVTNVSHSQEAEKLTLNESEQPRDANTINDNDLKDQPKKKQKLGDYKVPSIADDEKNALPISKDGYIRVPKERVNVNLTSIKKLREKVDDSIHRELTDIFANLNYVGVVDEERRLAAIQHDLKLFLIDYGSVCYELFYQIGLTDFANFGKINLQSTNVSDDIVLYNLLSEFDELNDDASKEKIISKIWDMSSMLNEYYSIELVNDGLDNDLKSVKLKSLPLLLKGYIPSLVKLPFFIYRLGKEVDWEDEQECLDGILREIALLYIPDMVPKVDTLDASLSEDEKAQFINRKEHISSLLEHVLFPCIKRRFLAPRHILKDVVEIANLPDLYKVFERC

SEQ ID NO: 31 - protein, 769 aa, Saccharomyces cerevisiae
MSLRIKALDASVVNKIAAGEIIISPVNALKEMMENSIDANATMIDILVKEGGIKVLQITDNGSGINKADLPILCERFTTSKLQKFEDLSQIQTYGFRGEALASISHVARVTVTTKVKEDRCAWRVSYAEGKMLESPKPVAGKDGTTILVEDLFFNIPSRLRALRSHNDEYSKILDVVGRYAIHSKDIGFSCKKFGDSNYSLSVKPSYTVQDRIRTVFNKSVASNLITFHISKVEDLNLESVDGKVCNLNFISKKSISLIFFINNHLVTCDLLRRALNSVYSNYLPKGFRPFIYLGIVIDPAAVDVNVHPTKREVRFLSQDEIIEKIANQLHAELSAIDTSRTFKASSISTNKPESLIPFNDTIESDRNRKSLRQAQVVENSYTTANSQLRKAKRQENKLVRIDASQAKITSFLSSSQQFNFEGSSTKRQLSEPKVTNVSHSQEAEKLTLNESEQPRDANTINDNDLKDQPKKKQKLGDYKVPSIADDEKNALPISKDGYIRVPKERVNVNLTSIKKLREKVDDSIHRELTDIFANLNYVGVVDEERRLAAIQHDLKLFLIDYGSVCYELFYQIGLTDFANFGKINLQSTNVSDDIVLYNLLSEFDELNDDASKEKIISKIWDMSSMLNEYYSIELVNDGLDNDLKSVKLKSLPLLLKGYIPSLVKLPFFIYRLGKEVDWEDEQECLDGILREIALLYIPDMVPKVDTLDASLSEDEKAQFINRKEHISSLLEHVLFPCIKRRFLAPRHILKDVVEIANLPDLYKVFERC

SEQ ID NO: 32 - protein, 769 aa, Saccharomyces cerevisiae
MSLRIKALDASVVNKIAAGEIIISPVNALKEMMENSIDANATMIDILVKEGGIKVLQITDNGSGINKADLPILCERFTTSKLQKFEDLSQIQTYGFRGEALASISHVARVTVTTKVKEDRCAWRVSYAEGKMLESPKPVAGKDGTTILVEDLFFNIPSRLRALRSHNDEYSKILDVVGRYAIHSKDIGFSCKKFGDSNYSLSVKPSYTVQDRIRTVFNKSVASNLITFHISKVEDLNLESVDGKVCNLNFISKKSISLIFFINNRLVTCDLLRRALNSVYSNYLPKGFRPFIYLGIVIDPAAVDVNVHPTKREVRFLSQDEIIEKAANQLHAELSAIDTSRTFKASSISTNKPESLIPFNDTIESDRNRKSLRQAQVVENSYTTANSQLRKAKRQENKLVRIDASQAKITSFLSSSQQFNFEGSSTKRQLSEPKVTNVSHSQEAEKLTLNESEQPRDANTINDNDLKDQPKKKQKLGDYKVPSIADDEKNALPISKDGYIRVPKERVNVNLTSIKKLREKVDDSIHRELTDIFANLNYVGVVDEERRLAAIQHDLKLFLIDYGSVCYELFYQIGLTDFANFGKINLQSTNVSDDIVLYNLLSEFDELNDDASKEKIISKIWDMSSMLNEYYSIELVNDGLDNDLKSVKLKSLPLLLKGYIPSLVKLPFFIYRLGKEVDWEDEQECLDGILREIALLYIPDMVPKVDTLDASLSEDEKAQFINRKEHISSLLEHVLFPCIKRRFLAPRHILKDVVEIANLPDLYKVFERC

SEQ ID NO: 33 - protein, 769 aa, Saccharomyces cerevisiae
MSLRIKALDASVVNKIAAGEIIISPVNALKEMMENSIDANATMIDILVKEGGIKVLQITDNGSGINKADLPILCERFTTSKLQKFEDLSQIQTYGFRGEALASISHVARVTVTTKVKEDRCAWRVSYAEGKMLESPKPVAGKDGTTILVEDLFFNIPSRLRALRSHNDEYSKILDVVGRYAIHSKDIGFSCKKFGDSNYSLSVKPSYTVQDRIRTVFNKSVASNLITFHISKVEDLNLESVDGKVCNLNFISKKSISLIFFINNRLVTCDLLRRALNSVYSNYLPKGFRPFIYLGIVIDPAAVDVNVHPTKREVRFLSQDEIIEKVANQLHAELSAIDTSRTFKASSISTNKPESLIPFNDTIESDRNRKSLRQAQVVENSYTTANSQLRKAKRQENKLVRIDASQAKITSFLSSSQQFNFEGSSTKRQLSEPKVTNVSHSQEAEKLTLNESEQPRDANTINDNDLKDQPKKKQKLGDYKVPSIADDEKNALPISKDGYIRVPKERVNVNLTSIKKLREKVDDSIHRELTDIFANLNYVGVVDEERRLAAIQHDLKLFLIDYGSVCYELFYQIGLTDFANFGKINLQSTNVSDDIVLYNLLSEFDELNDDASKEKIISKIWDMSSMLNEYYSIELVNDGLDNDLKSVKLKSLPLLLKGYIPSLVKLPFFIYRLGKEVDWEDEQECLDGILREIALLYIPDMVPKVDTLDASLSEDEKAQFINRKEHISSLLEHVLFPCIKRRFLAPRHILKDVVEIANLPDLYKVFERC

SEQ ID NO: 34 - protein, 769 aa, Saccharomyces cerevisiae
MSLRIKALDASVVNKIAAGEIIISPVNALKEMMENSIDANATMIDILVKEGGIKVLQITDNGSGINKADLPILCERFTTSKLQKFEDLSQIQTYGFRGEALASISHVARVTVTTKVKEDRCAWRVSYAEGKMLESPKPVAGKDGTTILVEDLFFNIPSRLRALRSHNDEYSKILDVVGRYAIHSKDIGFSCKKFGDSNYSLSVKPSYTVQDRIRTVFNKSVASNLITFHISKVEDLNLESVDGKVCNLNFISKKSISLIFFINNRLVTCDLLRRALNSVYSNYLPKGFRPFIYLGIVIDPAAVDVNVHPTKREVRFLSQDEIIEKIANQLHAELSAIDTSRTFKASSISTNKPESLIPFNDTIESDRNRKSLRQAQVVENSYTTANSQLRKAKRQENKLVRIDASQAKITSFLSSSQQFNFEGSSTKRQLSEPKVTNVSHSQEAEKLTLNESEQPRDANTINDNDLKDQPKKKQKLGDYKVPSIADDEKNALPISKDGYIRVPKERVNVNLTSIKKLREKVDDSIHRELTDIFANLNYVGVVDEERRLAAILHDLKLFLIDYGSVCYELFYQIGLTDFANFGKINLQSTNVSDDIVLYNLLSEFDELNDDASKEKIISKIWDMSSMLNEYYSIELVNDGLDNDLKSVKLKSLPLLLKGYIPSLVKLPFFIYRLGKEVDWEDEQECLDGILREIALLYIPDMVPKVDTLDASLSEDEKAQFINRKEHISSLLEHVLFPCIKRRFLAPRHILKDVVEIANLPDLYKVFERC

SEQ ID NO: 35 - protein, 769 aa, Saccharomyces cerevisiae
MSLRIKALDASVVNKIAAGEIIISPVNALKEMMENSIDANATMIDILVKEGGIKVLQITDNGSGINKADLPILCERFTTSKLQKFEDLSQIQTYGFRGEALASISHVARVTVTTKVKEDRCAWRVSYAEGKMLESPKPVAGKDGTTILVEDLFFNIPSRLRALRSHNDEYSKILDVVGRYAIHSKDIGFSCKKFGDSNYSLSVKPSYTVQDRIRTVFNKSVASNLITFHISKVEDLNLESVDGKVCNLNFISKKSISLIFFINNRLVTCDLLRRALNSVYSNYLPKGFRPFIYLGIVIDPAAVDVNVHPTKREVRFLSQDEIIEKIANQLHAELSAIDTSRTFKASSISTNKPESLIPFNDTIESDRNRKSLRQAQVVENSYTTANSQLRKAKRQENKLVRIDASQAKITSFLSSSQQFNFEGSSTKRQLSEPKVTNVSHSQEAEKLTLNESEQPRDANTINDNDLKDQPKKKQKLGDYKVPSIADDEKNALPISKDGYIRVPKERVNVNLTSIKKLREKVDDSIHRELTDIFANLNYVGVVDEERRLAAIQHDLKLFLIDYGSVCYELFYQIGLTDFANFGKINLQSTNVSDDIVLYNLLSEFDELNDDASKEKIISKIWDMSSMLNEYYSIELVNDGLDNDLKSVKLKSLPLLLKGYIPSLVKLPFFIYPLGKEVDWEDEQECLDGILREIALLYIPDMVPKVDTLDASLSEDEKAQFINRKEHISSLLEHVLFPCIKRRFLAPRHILKDVVEIANLPDLYKVFERC

SEQ ID NO: 36 - protein, 769 aa, Saccharomyces cerevisiae
MSLRIKALDASVVNKIAAGEIIISPVNALKEMMENSIDANATMIDILVKEGGIKVLQITDNGSGINKADLPILCERFTTSKLQKFEDLSQIQTYGFRGEALASISHVARVTVTTKVKEDRCAWRVSYAEGKMLESPKPVAGKDGTTILVEDLFFNIPSRLRALRSHNDEYSKILDVVGRYAIHSKDIGFSCKKFGDSNYSLSVKPSYTVQDRIRTVFNKSVASNLITFHISKVEDLNLESVDGKVCNLNFISKKSISLIFFINNRLVTCDLLRRALNSVYSNYLPKGFRPFIYLGIVIDPAAVDVNVHPTKREVRFLSQDEIIEKIANQLHAELSAIDTSRTFKASSISTNKPESLIPFNDTIESDRNRKSLRQAQVVENSYTTANSQLRKAKRQENKLVRIDASQAKITSFLSSSQQFNFEGSSTKRQLSEPKVTNVSHSQEAEKLTLNESEQPRDANTINDNDLKDQPKKKQKLGDYKVPSIADDEKNALPISKDGYIRVPKERVNVNLTSIKKLREKVDDSIHRELTDIFANLNYVGVVDEERRLAAIQHDLKLFLIDYGSVCYELFYQIGLTDFANFGKINLQSTNVSDDIVLYNLLSEFDELNDDASKEKIISKIWDMSSMLNEYYSIELVNDGLDNDLKSVKLKSLPLLLKGYIPSLVKLPFFIYRLGKEVDWEDEQECLDGILREITLLYIPDMVPKVDTLDASLSEDEKAQFINRKEHISSLLEHVLFPCIKRRFLAPRHILKDVVEIANLPDLYKVFERC

SEQ ID NO: 37 - protein, 966 aa, Saccharomyces cerevisiae
MSSTRPELKFSDVSEERNFYKKYTGLPKKPLKTIRLVDKGDYYTVIGSDAIFVADSVYHTQSVLKNCQLDPVTAKNFHEPTKYVTVSLQVLATLLKLCLLDLGYKVEIYDKGWKLIKSASPGNIEQVNELMNMNIDSSIIIASLKVQWNSQDGNCIIGVAFIDTTAYKVGMLDIVDNEVYSNLESFLIQLGVKECLVQDLTSNSNSNAEMQKVINVIDRCGCVVTLLKNSEFSEKDVELDLTKLLGDDLALSLPQKYSKLSMGACNALIGYLQLLSEQDQVGKYELVEHKLKEFMKLDASAIKALNLFPQGPQNPFDSNNLAVSGFTSAGNSGKVTSLFQLLNHCKTNAGVRLLNEWLKQPLTNIDEINKRHDLVDYLIDQIELRQMLTSEYLPMIPDIRRLTKKLNKRGNLEDVLKIYQFSKRIPEIVQVFTSFLEDDSPTEPVNELVRSVWLAPLSHHVEPLSKFEEMVETTVDLDAYEENNEFMIKVEFNEELGKIRSKLDTLRDEIHSIHLDSAEDLGFDPDKKLKLENHHLHGWCMRLTRNDAKELRKHKKYIELSTVKAGIFFSTKQLKSIANETNILQKEYDKQQSALVREIINITLTYTPVFEKLSLVLAHLDVIASFAHTSSYAPIPYIRPKLHPMDSERRTHLISSRHPVLEMQDDISFISNDVTLESGKGDFLIITGPNMGGKSTYIRQVGVISLMAQIGCFVPCEEAEIAIVDAILCRVGAGDSQLKGVSTFMVEILETASILKNASKNSLIIVDELGRGTSTYDGFGLAWAIAEHIASKIGCFALFATHFHELTELSEKLPNVKNMHVVAHIEKNLKEQKHDDEDITLLYKVEPGISDQSFGIHVAEVVQFPEKIVKMAKRKANELDDLKTNNEDLKKAKLSLQEVNEGNIRLKALLKEWIRKVKEEGLHDPSKITEEASQHKIQELLRAIANEPEKENDNYLEIYKSPCCYN

SEQ ID NO: 38 - protein, 772 aa, Artificial sequence
  hybrid human-yeast MLH1 protein
MSFVAGVIRRLDETVVNRIAAGEVIQRPANAIKEMIENCLDAKSTSIQVIVKEGGLKLIQIQDNGTGIRKEDLDIVCERFTTSKLQSFEDLASISTYGFRGEALASISHVAHVTITTKTADGKCAYRASYSDGKLKAPPKPCAGNQGTQITVEDLFYNIATRRKALKNPSEEYGKILDVVGRYAIHSKDIGFSCKKFGDSNYSLSVKPSYTVQDRIRTVFNKSVASNLITFHISKVEDLNLESVDGKVCNLNFISKKSISLIFFINNRLVTCDLLRRALNSVYSNYLPKGFRPFIYLGIVIDPAAVDVNVHPTKREVRFLSQDEIIEKIANQLHAELSAIDTSRTFKASSISTNKPESLIPFNDTIESDRNRKSLRQAQVVENSYTTANSQLRKAKRQENKLVRIDASQAKITSFLSSSQQFNFEGSSTKRQLSEPKVTNVSHSQEAEKLTLNESEQPRDANTINDNDLKDQPKKKQKLGDYKVPSIADDEKNALPISKDGYIRVPKERVNVNLTSIKKLREKVDDSIHRELTDIFANLNYVGVVDEERRLAAIQHDLKLFLIDYGSVCYELFYQIGLTDFANFGKINLQSTNVSDDIVLYNLLSEFDELNDDASKEKIISKIWDMSSMLNEYYSIELVNDGLDNDLKSVKLKSLPLLLKGYIPSLVKLPFFIYRLGKEVDWEDEQECLDGILREIALLYIPDMVPKVDTLDASLSEDEKAQFINRKEHISSLLEHVLFPCIKRRFLAPRHILKDVVEIANLPDLYKVFERC

SEQ ID NO: 39 - protein, 772 aa, Artificial sequence
  hybrid human-yeast MLH1 protein
MSFVAGVIRRLDETVVNRIAAGEVIQRPANAIKEMIENCLDAKSTSIQVIVKEGGLKLIQIQDNGTGIRKEDLDIVCERFTTSKLQKFEDLSQIQTYGFRGEALASISHVARVTVTTKVKEDRCAWRVSYAEGKMLESPKPVAGKDGTTILVEDLFFNIPSRLRALRSHNDEYSKILDVVGRYAIHSKDIGFSCKKFGDSNYSLSVKPSYTVQDRIRTVFNKSVASNLITFHISKVEDLNLESVDGKVCNLNFISKKSISLIFFINNRLVTCDLLRRALNSVYSNYLPKGFRPFIYLGIVIDPAAVDVNVHPTKREVRFLSQDEIIEKIANQLHAELSAIDTSRTFKASSISTNKPESLIPFNDTIESDRNRKSLRQAQVVENSYTTANSQLRKAKRQENKLVRIDASQAKITSFLSSSQQFNFEGSSTKRQLSEPKVTNVSHSQEAEKLTLNESEQPRDANTINDNDLKDQPKKKQKLGDYKVPSIADDEKNALPISKDGYIRVPKERVNVNLTSIKKLREKVDDSIHRELTDIFANLNYVGVVDEERRLAAIQHDLKLFLIDYGSVCYELFYQIGLTDFANFGKINLQSTNVSDDIVLYNLLSEFDELNDDASKEKIISKIWDMSSMLNEYYSIELVNDGLDNDLKSVKLKSLPLLLKGYIPSLVKLPFFIYRLGKEVDWEDEQECLDGILREIALLYIPDMVPKVDTLDASLSEDEKAQFINRKEHISSLLEHVLFPCIKRRFLAPRHILKDVVEIANLPDLYKVFERC

SEQ ID NO: 40 - protein, 769 aa, Artificial sequence
  hybrid human-yeast MLH1 protein
MSLRIKALDASVVNKIAAGEIIISPVNALKEMMENSIDAKSTSIQVIVKEGGLKLIQIQDNGTGIRKEDLDIVCERFTTSKLQSFEDLASISTYGFRGEALASISHVAHVTITTKTADGKCAYRASYAEGKMLESPKPVAGKDGTTILVEDLFFNIPSRLRALRSHNDEYSKILDVVGRYAIHSKDIGFSCKKFGDSNYSLSVKPSYTVQDRIRTVFNKSVASNLITFHISKVEDLNLESVDGKVCNLNFISKKSISLIFFINNRLVTCDLLRRALNSVYSNYLPKGFRPFIYLGIVIDPAAVDVNVHPTKREVRFLSQDEIIEKIANQLHAELSAIDTSRTFKASSISTNKPESLIPFNDTIESDRNRKSLRQAQVVENSYTTANSQLRKAKRQENKLVRIDASQAKITSFLSSSQQFNFEGSSTKRQLSEPKVTNVSHSQEAEKLTLNESEQPRDANTINDNDLKDQPKKKQKLGDYKVPSIADDEKNALPISKDGYIRVPKERVNVNLTSIKKLREKVDDSIHRELTDIFANLNYVGVVDEERRLAAIQHDLKLFLIDYGSVCYELFYQIGLTDFANFGKINLQSTNVSDDIVLYNLLSEFDELNDDASKEKIISKIWDMSSMLNEYYSIELVNDGLDNDLKSVKLKSLPLLLKGYIPSLVKLPFFIYRLGKEVDWEDEQECLDGILREIALLYIPDMVPKVDTLDASLSEDEKAQFINRKEHISSLLEHVLFPCIKRRFLAPRHILKDVVEIANLPDLYKVFERC

SEQ ID NO: 41 - protein, 769 aa, Artificial sequence
  hybrid human-yeast MLH1 protein
MSLRIKALDASVVNKIAAGEIIISPVNALKEMMENSIDAKSTSIQVIVKEGGLKLIQIQDNGTGIRKEDLDIVCERFTTSKLQKFEDLSQIQTYGFRGEALASISHVARVTVTTKVKEDRCAWRVSYAEGKMLESPKPVAGKDGTTILVEDLFFNIPSRLRALRSHNDEYSKILDVVGRYAIHSKDIGFSCKKFGDSNYSLSVKPSYTVQDRIRTVFNKSVASNLITFHISKVEDLNLESVDGKVCNLNFISKKSISLIFFINNRLVTCDLLRRALNSVYSNYLPKGFRPFIYLGIVIDPAAVDVNVHPTKREVRFLSQDEIIEKIANQLHAELSAIDTSRTFKASSISTNKPESLIPFNDTIESDRNRKSLRQAQVVENSYTTANSQLRKAKRQENKLVRIDASQAKITSFLSSSQQFNFEGSSTKRQLSEPKVTNVSHSQEAEKLTLNESEQPRDANTINDNDLKDQPKKKQKLGDYKVPSIADDEKNALPISKDGYIRVPKERVNVNLTSIKKLREKVDDSIHRELTDIFANLNYVGVVDEERRLAAIQHDLKLFLIDYGSVCYELFYQIGLTDFANFGKINLQSTNVSDDIVLYNLLSEFDELNDDASKEKIISKIWDMSSMLNEYYSIELVNDGLDNDLKSVKLKSLPLLLKGYIPSLVKLPFFIYRLGKEVDWEDEQECLDGILREIALLYIPDMVPKVDTLDASLSEDEKAQFINRKEHISSLLEHVLFPCIKRRFLAPRHILKDVVEIANLPDLYKVFERC

SEQ ID NO: 42 - protein, 769 aa, Artificial sequence
  hybrid human-yeast MLH1 protein
MSLRIKALDASVVNKIAAGEIIISPVNALKEMMENSIDANATMIDILVKEGGIKVLQITDNGSGINKADLPILCERFTTSKLQSFEDLASISTYGFRGEALASISHVAHVTITTKTADGKCAYRASYSDGKMLESPKPVAGKDGTTILVEDLFFNIPSRLRALRSHNDEYSKILDVVGRYAIHSKDIGFSCKKFGDSNYSLSVKPSYTVQDRIRTVFNKSVASNLITFHISKVEDLNLESVDGKVCNLNFISKKSISLIFFINNRLVTCDLLRRALNSVYSNYLPKGFRPFIYLGIVIDPAAVDVNVHPTKREVRFLSQDEIIEKIANQLHAELSAIDTSRTFKASSISTNKPESLIPFNDTIESDRNRKSLRQAQVVENSYTTANSQLRKAKRQENKLVRIDASQAKITSFLSSSQQFNFEGSSTKRQLSEPKVTNVSHSQEAEKLTLNESEQPRDANTINDNDLKDQPKKKQKLGDYKVPSIADDEKNALPISKDGYIRVPKERVNVNLTSIKKLREKVDDSIHRELTDIFANLNYVGVVDEERRLAAIQHDLKLFLIDYGSVCYELFYQIGLTDFANFGKINLQSTNVSDDIVLYNLLSEFDELNDDASKEKIISKIWDMSSMLNEYYSIELVNDGLDNDLKSVKLKSLPLLLKGYIPSLVKLPFFIYRLGKEVDWEDEQECLDGILREIALLYIPDMVPKVDTLDASLSEDEKAQFINRKEHISSLLEHVLFPCIKRRFLAPRHILKDVVEIANLPDLYKVFERC

SEQ ID NO: 43 - protein, 764 aa, Artificial sequence
  hybrid human-yeast MLH1 protein
MSLRIKALDASVVNKIAAGEIIISPVNALKEMMENSIDANATMIDILVKEGGIKVLQITDNGSGINKADLPILCERFTTSKLQKFEDLSQIQTYGFRGEALASISHVARVTVTTKVKEDRCAWRVSYAEGKMLESPKPVAGKDGTTILVEDLFFNIPSRLRALRSHNDEYSKILDVVGRYAIHSKDIGFSCKKFGDSNYSLSVKPSYTVQDRIRTVFNKSVASNLITFHISKVEDLNLESVDGKVCNLNFISKKSISLIFFINNRLVTCDLLRRALNSVYSNYLPKGFRPFIYLGIVIDPAAVDVNVHPTKREVRFLSQDEIIEKIANQLHAELSAIDTSRTFKASSISTNKPESLIPFNDTIESDRNRKSLRQAQVVENSYTTANSQLRKAKRQENKLVRIDASQAKITSFLSSSQQFNFEGSSTKRQLSEPKVTNVSHSQEAEKLTLNESEQPRDANTINDNDLKDQPKKKQKLGDYKVPSIADDEKNALPISKDGYIRVPKERRIINLTSVLSLQEEINEQGHEVLREMLHNHSFVGCVNPQWALAQHQTKLYLLNTTKLSEELFYQILIYDFANFGVLRLSEPAPLFDLAMLALDSPESGWTEEDGPKEGLAEYIVEFLKKKAEMLADYFSLEIDEEGNLIGLPLLIDNYVPPLEGLPIFILRLATEVNWDEEKECFESLSKECAMFYSIRKQYISEESTLSGQQSEVPGSIPNSWKWTVEHIVYKALRSHILPPKHFTEDGNILQLANLPDLYKVFERC

SEQ ID NO: 44 - protein, 767 aa, Artificial sequence
  hybrid human-yeast MLH1 protein
MSLRIKALDASVVNKIAAGEIIISPVNALKEMMENSIDANATMIDILVKEGGIKVLQITDNGSGINKADLPILCERFTTSKLQKFEDLSQIQTYGFRGEALASISHVARVTVTTKVKEDRCAWRVSYAEGKMLESPKPVAGKDGTTILVEDLFFNIPSRLRALRSHNDEYSKILDVVGRYAIHSKDIGFSCKKFGDSNYSLSVKPSYTVQDRIRTVFNKSVASNLITFHISKVEDLNLESVDGKVCNLNFISKKSISLIFFINNRLVTCDLLRRALNSVYSNYLPKGFRPFIYLGIVIDPAAVDVNVHPTKREVRFLSQDEIIEKIANQLHAELSAIDTSRTFKASSISTNKPESLIPFNDTIESDRNRKSLRQAQVVENSYTTANSQLRKAKRQENKLVRIDASQAKITSFLSSSQQFNFEGSSTKRQLSEPKVTNVSHSQEAEKLTLNESEQPRDANTINDNDLKDQPKKKQKLGDYKVPSIADDEKNALPISKDGYIRVPKERRIINLTSVLSLQEEINEQGHEVLREMLHNHSFVGCVNPQWALAQHQTKLYLLNTTKLSEELFYQILIYDFANFGVLRLSEPAPLFDIVLYNLLSEFDELNDDASKEKIISKIWDMSSMLNEYYSIELVNDGLDNDLKSVKLKSLPLLLKGYIPSLVKLPFFIYRLGKEVDWEDEQECLDGILREIALLYIPDMVPKVDTLDASLSEDEKAQFINRKEHISSLLEHVLFPCIKRRFLAPRHILKDVVEIANLPDLYKVFERC

SEQ ID NO: 45 - protein, 769 aa, Artificial sequence
  hybrid human-yeast MLH1 protein
MSLRIKALDASVVNKIAAGEIIISPVNALKEMMENSIDAKSTSIQVIVKEGGLKLIQIKDNGTGIRKEDLDIVCERFTTSKLQKFEDLSQIQTYGFRGEALASISHVARVTVTTKVKEDRCAWRVSYAEGKMLESPKPVAGKDGTTILVEDLFFNIPSRLRALRSHNDEYSKILDVVGRYAIHSKDIGFSCKKFGDSNYSLSVKPSYTVQDRIRTVFNKSVASNLITFHISKVEDLNLESVDGKVCNLNFISKKSISLIFFINNRLVTCDLLRRALNSVYSNYLPKGFRPFIYLGIVIDPAAVDVNVHPTKREVRFLSQDEIIEKIANQLHAELSAIDTSRTFKASSISTNKPESLIPFNDTIESDRNRKSLRQAQVVENSYTTANSQLRKAKRQENKLVRIDASQAKITSFLSSSQQFNFEGSSTKRQLSEPKVTNVSHSQEAEKLTLNESEQPRDANTINDNDLKDQPKKKQKLGDYKVPSIADDEKNALPISKDGYIRVPKERVNVNLTSIKKLREKVDDSIHRELTDIFANLNYVGVVDEERRLAAIQHDLKLFLIDYGSVCYELFYQIGLTDFANFGKINLQSTNVSDDIVLYNLLSEFDELNDDASKEKIISKIWDMSSMLNEYYSIELVNDGLDNDLKSVKLKSLPLLLKGYIPSLVKLPFFIYRLGKEVDWEDEQECLDGILREIALLYIPDMVPKVDTLDASLSEDEKAQFINRKEHISSLLEHVLFPCIKRRFLAPRHILKDVVEIANLPDLYKVFERC

SEQ ID NO: 46 - protein, 769 aa, Artificial sequence
  hybrid human-yeast MLH1 protein
MSLRIKALDASVVNKIAAGEIIISPVNALKEMMENSIDAKSTSIQVIVKEGGLKLIQIQDNGTGIKKEDLDIVCERFTTSKLQKFEDLSQIQTYGFRGEALASISHVARVTVTTKVKEDRCAWRVSYAEGKMLESPKPVAGKDGTTILVEDLFFNIPSRLRALRSHNDEYSKILDVVGRYAIHSKDIGFSCKKFGDSNYSLSVKPSYTVQDRIRTVFNKSVASNLITFHISKVEDLNLESVDGKVCNLNFISKKSISLIFFINNRLVTCDLLRRALNSVYSNYLPKGFRPFIYLGIVIDPAAVDVNVHPTKREVRFLSQDEIIEKIANQLHAELSAIDTSRTFKASSISTNKPESLIPFNDTIESDRNRKSLRQAQVVENSYTTANSQLRKAKRQENKLVRIDASQAKITSFLSSSQQFNFEGSSTKRQLSEPKVTNVSHSQEAEKLTLNESEQPRDANTINDNDLKDQPKKKQKLGDYKVPSIADDEKNALPISKDGYIRVPKERVNVNLTSIKKLREKVDDSIHRELTDIFANLNYVGVVDEERRLAAIQHDLKLFLIDYGSVCYELFYQIGLTDFANFGKINLQSTNVSDDIVLYNLLSEFDELNDDASKEKIISKIWDMSSMLNEYYSIELVNDGLDNDLKSVKLKSLPLLLKGYIPSLVKLPFFIYRLGKEVDWEDEQECLDGILREIALLYIPDMVPKVDTLDASLSEDEKAQFINRKEHISSLLEHVLFPCIKRRFLAPRHILKDVVEIANLPDLYKVFERC

SEQ ID NO: 47 - protein, 769 aa, Artificial sequence
  hybrid human-yeast MLH1 protein
MSLRIKALDASVVNKIAAGEIIISPVNALKEMMENSIDANATMIDILVKEGGIKVLQITDNGSGINKADLPILCERFTTSKLQSFEDLAGISTYGFRGEALASISHVAHVTITTKTADGKCAYRASYSDGKMLESPKPVAGKDGTTILVEDLFFNIPSRLRALRSHNDEYSKILDVVGRYAIHSKDIGFSCKKFGDSNYSLSVKPSYTVQDRIRTVFNKSVASNLITFHISKVEDLNLESVDGKVCNLNFISKKSISLIFFINNRLVTCDLLRRALNSVYSNYLPKGFRPFIYLGIVIDPAAVDVNVHPTKREVRFLSQDEIIEKIANQLHAELSAIDTSRTFKASSISTNKPESLIPFNDTIESDRNRKSLRQAQVVENSYTTANSQLRKAKRQENKLVRIDASQAKITSFLSSSQQFNFEGSSTKRQLSEPKVTNVSHSQEAEKLTLNESEQPRDANTINDNDLKDQPKKKQKLGDYKVPSIADDEKNALPISKDGYIRVPKERVNVNLTSIKKLREKVDDSIHRELTDIFANLNYVGVVDEERRLAAIQHDLKLFLIDYGSVCYELFYQIGLTDFANFGKINLQSTNVSDDIVLYNLLSEFDELNDDASKEKIISKIWDMSSMLNEYYSIELVNDGLDNDLKSVKLKSLPLLLKGYIPSLVKLPFFIYRLGKEVDWEDEQECLDGILREIALLYIPDMVPKVDTLDASLSEDEKAQFINRKEHISSLLEHVLFPCIKRRFLAPRHILKDVVEIANLPDLYKVFERC

SEQ ID NO: 48 - protein, 769 aa, Saccharomyces cerevisiae
MSLRIKALDASVVNKIAAGEIFISPVNALKEMMENSIDANATMIDILVKEGGIKVLQITDNGSGINKADLPILCERFTTSKLQKFEDLSQIQTYGFRGEALASISHVARVTVTTKVKEDRCAWRVSYAEGKMLESPKPVAGKDGTTILVEDLFFNIPSRLRALRSHNDEYSKILDVVGRYAIHSKDIGFSCKKFGDSNYSLSVKPSYTVQDRIRTVFNKSVASNLITFHISKVEDLNLESVDGKVCNLNFISKKSISLIFFINNRLVTCDLLRRALNSVYSNYLPKGFRPFIYLGIVIDPAAVDVNVHPTKREVRFLSQDEIIEKIANQLHAELSAIDTSRTFKASSISTNKPESLIPFNDTIESDRNRKSLRQAQVVENSYTTANSQLRKAKRQENKLVRIDASQAKITSFLSSSQQFNFEGSSTKRQLSEPKVTNVSHSQEAEKLTLNESEQPRDANTINDNDLKDQPKKKQKLGDYKVPSIADDEKNALPISKDGYIRVPKERVNVNLTSIKKLREKVDDSIHRELTDIFANLNYVGVVDEERRLAAIQHDLKLFLIDYGSVCYELFYQIGLTDFANFGKINLQSTNVSDDIVLYNLLSEFDELNDDASKEKIISKIWDMSSMLNEYYSIELVNDGLDNDLKSVKLKSLPLLLKGYIPSLVKLPFFIYRLGKEVDWEDEQECLDGILREIALLYIPDMVPKVDTLDASLSEDEKAQFINRKEHISSLLEHVLFPCIKRRFLAPRHILKDVVEIANLPDLYKVFERC

SEQ ID NO: 49 - protein, 769 aa, Saccharomyces cerevisiae
MSLRIKALDASVVNKIAAGEITISPVNALKEMMENSIDANATMIDILVKEGGIKVLQITDNGSGINKADLPILCERFTTSKLQKFEDLSQIQTYGFRGEALASISHVARVTVTTKVKEDRCAWRVSYAEGKMLESPKPVAGKDGTTILVEDLFFNIPSRLRALRSHNDEYSKILDVVGRYAIHSKDIGFSCKKFGDSNYSLSVKPSYTVQDRIRTVFNKSVASNLITFHISKVEDLNLESVDGKVCNLNFISKKSISLIFFINNRLVTCDLLRRALNSVYSNYLPKGFRPFIYLGIVIDPAAVDVNVHPTKREVRFLSQDEIIEKIANQLHAELSAIDTSRTFKASSISTNKPESLIPFNDTIESDRNRKSLRQAQVVENSYTTANSQLRKAKRQENKLVRIDASQAKITSFLSSSQQFNFEGSSTKRQLSEPKVTNVSHSQEAEKLTLNESEQPRDANTINDNDLKDQPKKKQKLGDYKVPSIADDEKNALPISKDGYIRVPKERVNVNLTSIKKLREKVDDSIHRELTDIFANLNYVGVVDEERRLAAIQHDLKLFLIDYGSVCYELFYQIGLTDFANFGKINLQSTNVSDDIVLYNLLSEFDELNDDASKEKIISKIWDMSSMLNEYYSIELVNDGLDNDLKSVKLKSLPLLLKGYIPSLVKLPFFIYRLGKEVDWEDEQECLDGILREIALLYIPDMVPKVDTLDASLSEDEKAQFINRKEHISSLLEHVLFPCIKRRFLAPRHILKDVVEIANLPDLYKVFERC

SEQ ID NO: 50 - protein, 769 aa, Saccharomyces cerevisiae
MSLRIKALDASVVNKIAAGEIIISLVNALKEMMENSIDANATMIDILVKEGGIKVLQITDNGSGINKADLPILCERFTTSKLQKFEDLSQIQTYGFRGEALASISHVARVTVTTKVKEDRCAWRVSYAEGKMLESPKPVAGKDGTTILVEDLFFNIPSRLRALRSHNDEYSKILDVVGRYAIHSKDIGFSCKKFGDSNYSLSVKPSYTVQDRIRTVFNKSVASNLITFHISKVEDLNLESVDGKVCNLNFISKKSISLIFFINNRLVTCDLLRRALNSVYSNYLPKGFRPFIYLGIVIDPAAVDVNVHPTKREVRFLSQDEIIEKIANQLHAELSAIDTSRTFKASSISTNKPESLIPFNDTIESDRNRKSLRQAQVVENSYTTANSQLRKAKRQENKLVRIDASQAKITSFLSSSQQFNFEGSSTKRQLSEPKVTNVSHSQEAEKLTLNESEQPRDANTINDNDLKDQPKKKQKLGDYKVPSIADDEKNALPISKDGYIRVPKERVNVNLTSIKKLREKVDDSIHRELTDIFANLNYVGVVDEERRLAAIQHDLKLFLIDYGSVCYELFYQIGLTDFANFGKINLQSTNVSDDIVLYNLLSEFDELNDDASKEKIISKIWDMSSMLNEYYSIELVNDGLDNDLKSVKLKSLPLLLKGYIPSLVKLPFFIYRLGKEVDWEDEQECLDGILREIALLYIPDMVPKVDTLDASLSEDEKAQFINRKEHISSLLEHVLFPCIKRRFLAPRHILKDVVEIANLPDLYKVFERC

SEQ ID NO: 51 - protein, 769 aa, Saccharomyces cerevisiae
MSLRIKALDASVVNKIAAGEIIISPVNALKEMMENSIDANATMIDILVKEGGIKVLQITDSGSGINKADLPILCERFTTSKLQKFEDLSQIQTYGFRGEALASISHVARVTVTTKVKEDRCAWRVSYAEGKMLESPKPVAGKDGTTILVEDLFFNIPSRLRALRSHNDEYSKILDVVGRYAIHSKDIGFSCKKFGDSNYSLSVKPSYTVQDRIRTVFNKSVASNLITFHISKVEDLNLESVDGKVCNLNFISKKSISLIFFINNRLVTCDLLRRALNSVYSNYLPKGFRPFIYLGIVIDPAAVDVNVHPTKREVRFLSQDEIIEKIANQLHAELSAIDTSRTFKASSISTNKPESLIPFNDTIESDRNRKSLRQAQVVENSYTTANSQLRKAKRQENKLVRIDASQAKITSFLSSSQQFNFEGSSTKRQLSEPKVTNVSHSQEAEKLTLNESEQPRDANTINDNDLKDQPKKKQKLGDYKVPSIADDEKNALPISKDGYIRVPKERVNVNLTSIKKLREKVDDSIHRELTDIFANLNYVGVVDEERRLAAIQHDLKLFLIDYGSVCYELFYQIGLTDFANFGKINLQSTNVSDDIVLYNLLSEFDELNDDASKEKIISKIWDMSSMLNEYYSIELVNDGLDNDLKSVKLKSLPLLLKGYIPSLVKLPFFIYRLGKEVDWEDEQECLDGILREIALLYIPDMVPKVDTLDASLSEDEKAQFINRKEHISSLLEHVLFPCIKRRFLAPRHILKDVVEIANLPDLYKVFERC

SEQ ID NO: 52 - protein, 769 aa, Saccharomyces cerevisiae
MSLRIKALDASVVNKIAAGEIIISPVNALKEMMENSIDANATMIDILVKEGGIKVLQITDNGSGINKADLPILCERFTISKLQKFEDLSQIQTYGFRGEALASISHVARVTVTTKVKEDRCAWRVSYAEGKMLESPKPVAGKDGTTILVEDLFFNIPSRLRALRSHNDEYSKILDVVGRYAIHSKDIGFSCKKFGDSNYSLSVKPSYTVQDRIRTVFNKSVASNLITFHISKVEDLNLESVDGKVCNLNFISKKSISLIFFINNRLVTCDLLRRALNSVYSNYLPKGFRPFIYLGIVIDPAAVDVNVHPTKREVRFLSQDEIIEKIANQLHAELSAIDTSRTFKASSISTNKPESLIPFNDTIESDRNRKSLRQAQVVENSYTTANSQLRKAKRQENKLVRIDASQAKITSFLSSSQQFNFEGSSTKRQLSEPKVTNVSHSQEAEKLTLNESEQPRDANTINDNDLKDQPKKKQKLGDYKVPSIADDEKNALPISKDGYIRVPKERVNVNLTSIKKLREKVDDSIHRELTDIFANLNYVGVVDEERRLAAIQHDLKLFLIDYGSVCYELFYQIGLTDFANFGKINLQSTNVSDDIVLYNLLSEFDELNDDASKEKIISKIWDMSSMLNEYYSIELVNDGLDNDLKSVKLKSLPLLLKGYIPSLVKLPFFIYRLGKEVDWEDEQECLDGILREIALLYIPDMVPKVDTLDASLSEDEKAQFINRKEHISSLLEHVLFPCIKRRFLAPRHILKDVVEIANLPDLYKVFERC

SEQ ID NO: 53 - protein, 769 aa, Saccharomyces cerevisiae
MSLRIKALDASVVNKIAAGEIIISPVNALKEMMENSIDANATMIDILVKEGGIKVLQITDNGSGINKADLPILCERFTTSELQKFEDLSQIQTYGFRGEALASISHVARVTVTTKVKEDRCAWRVSYAEGKMLESPKPVAGKDGTTILVEDLFFNIPSRLRALRSHNDEYSKILDVVGRYAIHSKDIGFSCKKFGDSNYSLSVKPSYTVQDRIRTVFNKSVASNLITFHISKVEDLNLESVDGKVCNLNFISKKSISLIFFINNRLVTCDLLRRALNSVYSNYLPKGFRPFIYLGIVIDPAAVDVNVHPTKREVRFLSQDEIIEKIANQLHAELSAIDTSRTFKASSISTNKPESLIPFNDTIESDRNRKSLRQAQVVENSYTTANSQLRKAKRQENKLVRIDASQAKITSFLSSSQQFNFEGSSTKRQLSEPKVTNVSHSQEAEKLTLNESEQPRDANTINDNDLKDQPKKKQKLGDYKVPSIADDEKNALPISKDGYIRVPKERVNVNLTSIKKLREKVDDSIHRELTDIFANLNYVGVVDEERRLAAIQHDLKLFLIDYGSVCYELFYQIGLTDFANFGKINLQSTNVSDDIVLYNLLSEFDELNDDASKEKIISKIWDMSSMLNEYYSIELVNDGLDNDLKSVKLKSLPLLLKGYIPSLVKLPFFIYRLGKEVDWEDEQECLDGILREIALLYIPDMVPKVDTLDASLSEDEKAQFINRKEHISSLLEHVLFPCIKRRFLAPRHILKDVVEIANLPDLYKVFERC

SEQ ID NO: 54 - protein, 769 aa, Saccharomyces cerevisiae
MSLRIKALDASVVNKIAAGEIIISPVNALKEMMENSIDANATMIDILVKEGGIKVLQITDNGSGINKADLPILCERFTTSKLQKFEDLSQIQTYGFRGEALASISHVVRVTVTTKVKEDRCAWRVSYAEGKMLESPKPVAGKDGTTILVEDLFFNIPSRLRALRSHNDEYSKILDVVGRYAIHSKDIGFSCKKFGDSNYSLSVKPSYTVQDRIRTVFNKSVASNLITFHISKVEDLNLESVDGKVCNLNFISKKSISLIFFINNRLVTCDLLRRALNSVYSNYLPKGFRPFIYLGIVIDPAAVDVNVHPTKREVRFLSQDEIIEKIANQLHAELSAIDTSRTFKASSISTNKPESLIPFNDTIESDRNRKSLRQAQVVENSYTTANSQLRKAKRQENKLVRIDASQAKITSFLSSSQQFNFEGSSTKRQLSEPKVTNVSHSQEAEKLTLNESEQPRDANTINDNDLKDQPKKKQKLGDYKVPSIADDEKNALPISKDGYIRVPKERVNVNLTSIKKLREKVDDSIHRELTDIFANLNYVGVVDEERRLAAIQHDLKLFLIDYGSVCYELFYQIGLTDFANFGKINLQSTNVSDDIVLYNLLSEFDELNDDASKEKIISKIWDMSSMLNEYYSIELVNDGLDNDLKSVKLKSLPLLLKGYIPSLVKLPFFIYRLGKEVDWEDEQECLDGILREIALLYIPDMVPKVDTLDASLSEDEKAQFINRKEHISSLLEHVLFPCIKRRFLAPRHILKDVVEIANLPDLYKVFERC

SEQ ID NO: 55 - protein, 769 aa, Saccharomyces cerevisiae
MSLRIKALDASVVNKIAAGEIIISPVNALKEMMENSIDANATMIDILVKEGGIKVLQITDNGSGINKADLPILCERFTTSKLQKFEDLSQIQTYGFRGEALASISHVARVTVTTKVKEDRCAWRVSYAEGKMLESPKPVAGKDGTTILVEDLFFNIPSRLRALRSHNDEYSKILDVVGRYAIHSKDIGFSCKKFGDSNYSLSVKPSYTVQDRIRTLFNKSVASNLITFHISKVEDLNLESVDGKVCNLNFISKKSISLIFFINNRLVTCDLLRRALNSVYSNYLPKGFRPFIYLGIVIDPAAVDVNVHPTKREVRFLSQDEIIEKIANQLHAELSAIDTSRTFKASSISTNKPESLIPFNDTIESDRNRKSLRQAQVVENSYTTANSQLRKAKRQENKLVRIDASQAKITSFLSSSQQFNFEGSSTKRQLSEPKVTNVSHSQEAEKLTLNESEQPRDANTINDNDLKDQPKKKQKLGDYKVPSIADDEKNALPISKDGYIRVPKERVNVNLTSIKKLREKVDDSIHRELTDIFANLNYVGVVDEERRLAAIQHDLKLFLIDYGSVCYELFYQIGLTDFANFGKINLQSTNVSDDIVLYNLLSEFDELNDDASKEKIISKIWDMSSMLNEYYSIELVNDGLDNDLKSVKLKSLPLLLKGYIPSLVKLPFFIYRLGKEVDWEDEQECLDGILREIALLYIPDMVPKVDTLDASLSEDEKAQFINRKEHISSLLEHVLFPCIKRRFLAPRHILKDVVEIANLPDLYKVFERC

SEQ ID NO: 56 - protein, 768 aa, Saccharomyces cerevisiae
MSLRIKALDASVVNKIAAGEIIISPVNALKEMMENSIDANATMIDILVKEGGIKVLQITDNGSGINKADLPILCERFTTSKLQKFEDLSQIQTYGFRGEALASISHVARVTVTTKVKEDRCAWRVSYAEGKMLESPKPVAGKDGTTILVEDLFFNIPSRLRALRSHNDEYSKILDVVGRYAIHSKDIGFSCKKFGDSNYSLSVKPSYTVQDRIRTVFNKSVASNLITFHISKVEDLNLESVDGKVCNLNFISKKSISLIFFNNRLVTCDLLRRALNSVYSNYLPKGFRPFIYLGIVIDPAAVDVNVHPTKREVRFLSQDEIIEKIANQLHAELSAIDTSRTFKASSISTNKPESLIPFNDTIESDRNRKSLRQAQVVENSYTTANSQLRKAKRQENKLVRIDASQAKITSFLSSSQQFNFEGSSTKRQLSEPKVTNVSHSQEAEKLTLNESEQPRDANTINDNDLKDQPKKKQKLGDYKVPSIADDEKNALPISKDGYIRVPKERVNVNLTSIKKLREKVDDSIHRELTDIFANLNYVGVVDEERRLAAIQHDLKLFLIDYGSVCYELFYQIGLTDFANFGKINLQSTNVSDDIVLYNLLSEFDELNDDASKEKIISKIWDMSSMLNEYYSIELVNDGLDNDLKSVKLKSLPLLLKGYIPSLVKLPFFIYRLGKEVDWEDEQECLDGILREIALLYIPDMVPKVDTLDASLSEDEKAQFINRKEHISSLLEHVLFPCIKRRFLAPRHILKDVVEIANLPDLYKVFERC

SEQ ID NO: 57 - protein, 769 aa, Saccharomyces cerevisiae
MSLRIKALDASVVNKIAAGEIIISPVNALKEMMENSIDANATMIDILVKEGGIKVLQITDNGSGINKADLPILCERFTTSKLQKFEDLSQIQTYGFRGEALASISHVARVTVTTKVKEDRCAWRVSYAEGKMLESPKPVAGKDGTTILVEDLFFNIPSRLRALRSHNDEYSKILDVVGRYAIHSKDIGFSCKKFGDSNYSLSVKPSYTVQDRIRTVFNKSVASNLITFHISKVEDLNLESVDGKVCNLNFISKKSISLIFFINNRLVTCDLLRRALNSVYSNYLPKGFRPFIYLGIVIDPAAVDVNVHPTKREVRFLSQDEIIEKIANQLHAELSAIDTSRTFKASSISTNKPESLIPFNDTIESDRNRKSLRQAQVVENSYTTANSQLRKAKRQENKLVRIDASQAKITSFLSSSQQFNFEGSSTKRQLSEPKVTNVSHSQEAEKLTLNESEQPRDANTINDNDLKDQPKKKQKLGDYKVPSIADDEKNALPISKDGYIRVPKERVNVNLTSIKKLREKVDDSIHRELTDIFANLNYVGVVDEERRLAAIQHDLKLFLIDYGSVCYELFYQIGLTDFANFGKINLQSTNVSDDIVLYNLLSEFDELNDDASKEKIISKIWDMSSMLNEYYSIELVNDGLDNDLKSVKLKSLPLLLKGYIPSLVKRPFFIYRLGKEVDWEDEQECLDGILREIALLYIPDMVPKVDTLDASLSEDEKAQFINRKEHISSLLEHVLFPCIKRRFLAPRHILKDVVEIANLPDLYKVFERC

SEQ ID NO: 58 - protein, 769 aa, Saccharomyces cerevisiae
MSLRIKALDASVVNKIAAGEIIISPVNALKEMMENSIDANATMIDILVKEGGIKVLQITDNGSGINKADLPILCERFTTSKLQKFEDLSQIQTYGFRGEALASISHVARVTVTTKVKEDRCAWRVSYAEGKMLESPKPVAGKDGTTILVEDLFFNIPSRLRALRSHNDEYSKILDVVGRYAIHSKDIGFSCKKFGDSNYSLSVKPSYTVQDRIRTVFNKSVASNLITFHISKVEDLNLESVDGKVCNLNFISKKSISLIFFINNRLVTCDLLRRALNSVYSNYLPKGFRPFIYLGIVIDPAAVDVNVHPTKREVRFLSQDEIIEKIANQLHAELSAIDTSRTFKASSISTNKPESLIPFNDTIESDRNRKSLRQAQVVENSYTTANSQLRKAKRQENKLVRIDASQAKITSFLSSSQQFNFEGSSTKRQLSEPKVTNVSHSQEAEKLTLNESEQPRDANTINDNDLKDQPKKKQKLGDYKVPSIADDEKNALPISKDGYIRVPKERVNVNLTSIKKLREKVDDSIHRELTDIFANLNYVGVVDEERRLAAIQHDLKLFLIDYGSVCYELFYQIGLTDFANFGKINLQSTNVSDDIVLYNLLSEFDELNDDASKEKIISKIWDMSSMLNEYYSIELVNDGLDNDLKSVKLKSLPLLLKGYIPSLVKLLFFIYRLGKEVDWEDEQECLDGILREIALLYIPDMVPKVDTLDASLSEDEKAQFINRKEHISSLLEHVLFPCIKRRFLAPRHILKDVVEIANLPDLYKVFERC

SEQ ID NO: 59 - protein, 769 aa, Saccharomyces cerevisiae
MSLRIKALDASVVNKIAAGEIIISPVNALKEMMENSIDANATMIDILVKEGGIKVLQITDNGSGINKADLPILCERFTTSKLQKFEDLSQIQTYGFRGEALASISHVARVTVTTKVKEDRCAWRVSYAEGKMLESPKPVAGKDGTTILVEDLFFNIPSRLRALRSHNDEYSKILDVVGRYAIHSKDIGFSCKKFGDSNYSLSVKPSYTVQDRIRTVFNKSVASNLITFHISKVEDLNLESVDGKVCNLNFISKKSISLIFFINNRLVTCDLLRRALNSVYSNYLPKGFRPFIYLGIVIDPAAVDVNVHPTKREVRFLSQDEIIEKIANQLHAELSAIDTSRTFKASSISTNKPESLIPFNDTIESDRNRKSLRQAQVVENSYTTANSQLRKAKRQENKLVRIDASQAKITSFLSSSQQFNFEGSSTKRQLSEPKVTNVSHSQEAEKLTLNESEQPRDANTINDNDLKDQPKKKQKLGDYKVPSIADDEKNALPISKDGYIRVPKERVNVNLTSIKKLREKVDDSIHRELTDIFANLNYVGVVDEERRLAAIQHDLKLFLIDYGSVCYELFYQIGLTDFANFGKINLQSTNVSDDIVLYNLLSEFDELNDDASKEKIISKIWDMSSMLNEYYSIELVNDGLDNDLKSVKLKSLPLLLKGYIPSLVKLPFFIYLLGKEVDWEDEQECLDGILREIALLYIPDMVPKVDTLDASLSEDEKAQFINRKEHISSLLEHVLFPCIKRRFLAPRHILKDVVEIANLPDLYKVFERC

SEQ ID NO: 60 - protein, 660 aa, Saccharomyces cerevisiae
MSLRIKALDASVVNKIAAGEIIISPVNALKEMMENSIDANATMIDILVKEGGIKVLQITDNGSGINKADLPILCERFTTSKLQKFEDLSQIQTYGFRGEALASISHVARVTVTTKVKEDRCAWRVSYAEGKMLESPKPVAGKDGTTILVEDLFFNIPSRLRALRSHNDEYSKILDVVGRYAIHSKDIGFSCKKFGDSNYSLSVKPSYTVQDRIRTVFNKSVASNLITFHISKVEDLNLESVDGKVCNLNFISKKSISLIFFINNRLVTCDLLRRALNSVYSNYLPKGFRPFIYLGIVIDPAAVDVNVHPTKREVRFLSQDEIIEKIANQLHAELSAIDTSRTFKASSISTNKPESLIPFNDTIESDRNRKSLRQAQVVENSYTTANSQLRKAKRQENKLVRIDASQAKITSFLSSSQQFNFEGSSTKRQLSEPKVTNVSHSQEAEKLTLNESEQPRDANTINDNDLKDQPKKKQKLGDYKVPSIADDEKNALPISKDGYIRVPKERVNVNLTSIKKLREKVDDSIHRELTDIFANLNYVGVVDEERRLAAIQHDLKLFLIDYGSVCYELFYQIGLTDFANFGKINLQSTNVSDDIVLYNLLSEFDELNDDASKEKIISKIWDMSSMLNEYYSIELVNDGLDNDLKSVKLKSLPLLLKGYI

SEQ ID NO: 61 - protein, 769 aa, Saccharomyces cerevisiae
MSLRIKALDASVVNKIAAGEIIISPVNALKEMMENSIDANATMIDILVKEGGIKVLQITDNGSGINKADLPILCERFTTSKLQKFEDLSQIQTYGFRGEALASISHVARVTVTTKVKEDRCAWRVSYAEGKMLESPKPVAGKDGTTILVEDLFFNIPSRLRALRSHNDEYSKILDVVGRYAIHSKDIGFSCKKFGDSNYSLSVKPSYTVQDRIRTVFNKSVASNLITFHISKVEDLNLESVDGKVCNLNFISKKSISLIFFINNRLVTCDLLRRALNSVYSNYLPKGFRPFIYLGIVIDPAAVDVNVHPTKREVRFLSQDEIIEKIANQLHAELSAIDTSRTFKASSISTNKPESLIPFNDTIESDRNRKSLRQAQVVENSYTTANSQLRKAKRQENKLVRIDASQAKITSFLSSSQQFNFEGSSTKRQLSEPKVTNVSHSQEAEKLTLNESEQPRDANTINDNDLKDQPKKKQKLGDYKVPSIADDEKNALPISKDGYIRVPKERVNVNLTSIKKLREKVDDSIHRELTDIFANLNYVGVVDEERRLAAIQHDLKLFLIDYGSVCYELFYQIGLTDFANFGKINLQSTNVSDDIVLYNLLSEFDELNDDASKEKIISKIWDMSSMLNEYYSIELVNDGLDNDLKSVKLKSLPLLLKGYIPSLVKLPFFIYRLGKEVDWEDEQECLDGILREIALLYIPDMVPKVDTLDASLSEDEKAQFINRKEHISSLLEYVLFPCIKRRFLAPRHILKDVVEIANLPDLYKVFERC

SEQ ID NO: 62 - protein, 769 aa, Saccharomyces cerevisiae
MSLRIKALDASVVNKIAAGEIIISPVNALKEMMENSIDANATMIDILVKEGGIKVLQITDNGSGINKADLPILCERFTTSKLQKFEDLSQIQTYGFRGEALASISHVARVTVTTKVKEDRCAWRVSYAEGKMLESPKPVAGKDGTTILVEDLFFNIPSRLRALRSHNDEYSKILDVVGRYAIHSKDIGFSCKKFGDSNYSLSVKPSYTVQDRIRTVFNKSVASNLITFHISKVEDLNLESVDGKVCNLNFISKKSISLIFFINNRLVTCDLLRRALNSVYSNYLPKGFRPFIYLGIVIDPAAVDVNVHPTKREVRFLSQDEIIEKIANQLHAELSAIDTSRTFKASSISTNKPESLIPFNDTIESDRNRKSLRQAQVVENSYTTANSQLRKAKRQENKLVRIDASQAKITSFLSSSQQFNFEGSSTKRQLSEPKVTNVSHSQEAEKLTLNESEQPRDANTINDNDLKDQPKKKQKLGDYKVPSIADDEKNALPISKDGYIRVPKERVNVNLTSIKKLREKVDDSIHRELTDIFANLNYVGVVDEERRLAAIQHDLKLFLIDYGSVCYELFYQIGLTDFANFGKINLQSTNVSDDIVLYNLLSEFDELNDDASKEKIISKIWDMSSMLNEYYSIELVNDGLDNDLKSVKLKSLPLLLKGYIPSLVKLPFFIYRLGKEVDWEDEQECLDGILREIALLYIPDMVPKVDTLDASLSEDEKAQFINRKEHISSLLEHVLFPCIKRRFVAPRHILKDVVEIANLPDLYKVFERC

SEQ ID NO: 63 - protein, 769 aa, Saccharomyces cerevisiae
MSLRIKALDASVVNKIAAGEIIISPVNALKEMMENSIDANATMIDILVKEGGIKVLQITDNGSGINKADLPILCERFTTSKLQKFEDLSQIQTYGFRGEALASISHVARVTVTTKVKEDRCAWRVSYAEGKMLESPKPVAGKDGTTILVEDLFFNIPSRLRALRSHNDEYSKILDVVGRYAIHSKDIGFSCKKFGDSNYSLSVKPSYTVQDRIRTVFNKSVASNLITFHISKVEDLNLESVDGKVCNLNFISKKSISLIFFINNRLVTCDLLRRALNSVYSNYLPKGFRPFIYLGIVIDPAAVDVNVHPTKREVRFLSQDEIIEKIANQLHAELSAIDTSRTFKASSISTNKPESLIPFNDTIESDRNRKSLRQAQVVENSYTTANSQLRKAKRQENKLVRIDASQAKITSFLSSSQQFNFEGSSTKRQLSEPKVTNVSHSQEAEKLTLNESEQPRDANTINDNDLKDQPKKKQKLGDYKVPSIADDEKNALPISKDGYIRVPKERVNVNLTSIKKLREKVDDSIHRELTDIFANLNYVGVVDEERRLAAIQHDLKLFLIDYGSVCYELFYQIGLTDFANFGKINLQSTNVSDDIVLYNLLSEFDELNDDASKEKIISKIWDMSSMLNEYYSIELVNDGLDNDLKSVKLKSLPLLLKGYIPSLVKLPFFIYRLGKEVDWEDEQECLDGILREIALLYIPDMVPKVDTLDASLSEDEKAQFINRKEHISSLLEHVLFPCIKRRFLAPRHILKDVVEIANLPDLYRVFERC

SEQ ID NO: 64 - protein, 769 aa, Saccharomyces cerevisiae
MSLRIKALDASVVNKIAAGEIIISPVNALKEMMENSIDANATMIDILVKEGGIKVLQITDNGSGINKADLPILCERFTTSKLQKFEDLSQIQTYGFRGEALASISHVARVTVTTKVKEDRCAWRVSYAEGKMLESPKPVAGKDGTTILVEDLFFNIPSRLRALRSHNDEYSKILDVVGRYAIHSKDIGFSCKKFGDSNYSLSVKPSYTVQDRIRTVFNKSVASNLITFHISKVEDLNLESVDGKVCNLNFISKKSISLIFFINNRLVTCDLLRRALNSVYSNYLPKGFRPFIYLGIVIDPAAVDVNVHPTKREVRFLSQDEIIEKIANQLHAELSAIDTSRTFKASSISTNKPESLIPFNDTIESDRNRKSLRQAQVVENSYTTANSQLRKAKRQENKLVRIDASQAKITSFLSSSQQFNFEGSSTKRQLSEPKVTNVSHSQEAEKLTLNESEQPRDANTINDNDLKDQPKKKQKLGDYKVPSIADDEKNALPISKDGYIRVPKERVNVNLTSIKKLREKVDDSIHRELTDIFANLNYVGVVDEERRLAAIQHDLKLFLIDYGSVCYELFYQIGLTDFANFGKINLQSTNVSDDIVLYNLLSEFDELNDDASKEKIISKIWDMSSMLNEYYSIELVNDGLDNDLKSVKLKSLPLLLKGYIPSLVKLPFFIYRLGKEVDWEDEQECLDGILREIALLYIPDMVPKVDTLDASLSEDEKAQFINRKEHISSLLEHVLFPCIKRRFLAPRHILKDVVEIANLPDLYKVFEWC

SEQ ID NO: 65 - protein, 966 aa, Saccharomyces cerevisiae
MSSTRPELKFSDVSEERNFYKKYTGLPKKPLKTIRLVDKGDYYTVIGSDAIFVADSVYHTQSVLKNCQLDPVTAKNFHEPTKYVTVSLQVLATLLKLCLLDLGYKVEIYDKGWKLIKSASPGNIEQVNELMNMNIDSSIIIASLKVQWNSQDGNCIIGVAFIDTTAYKVGMLDIVDNEVYSNLESFLIQLGVKECLVQDLTSNSNSNAEMQKVINVIDRCGCVVTLLKNSEFSEKDVELDLTKLLGDDLALSLPQKYSKLSMGACNALIGYLQLLSEQDQVGKYELVEHKLKEFMKLDASAIKALNLFPQGPQNPFGSNNLAVSGFTSAGNSGKVTSLFQLLNHCKTNAGVRLLNEWLKQPLTNIDEINKRHDLVDYLIDQIELRQMLTSEYLPMIPDIRRLTKKLNKRGNLEDVLKIYQFSKRIPEIVQVFTSFLEDDSPTEPVNELVRSVWLAPLSHHVEPLSKFEEMVETTVDLDAYEENNEFMIKVEFNEELGKIRSKLDTLRDEIHSIHLDSAEDLGFDPDKKLKLENHHLHGWCMRLTRNDAKELRKHKKYIELSTVKAGIFFSTKQLKSIANETNILQKEYDKQQSALVREIINITLTYTPVFEKLSLVLAHLDVIASFAHTSSYAPIPYIRPKLHPMDSERRTHLISSRHPVLEMQDDISFISNDVTLESGKGDFLIITGPNMGGKSTYIRQVGVISLMAQIGCFVPCEEAEIAIVDAILCRVGAGDSQLKGVSTFMVEILETASILKNASKNSLIIVDELGRGTSTYDGFGLAWAIAEHIASKIGCFALFATHFHELTELSEKLPNVKNMHVVAHIEKNLKEQKHDDEDITLLYKVEPGISDQSFGIHVAEVVQFPEKIVKMAKRKANELDDLKTNNEDLKKAKLSLQEVNEGNIRLKALLKEWIRKVKEEGLHDPSKITEEASQHKIQELLRAIANEPEKENDNYLEIYKSPCCYN

SEQ ID NO: 66 - protein, 934 aa, Homo sapiens [sequence omitted]

SEQ ID NO: 67 - DNA, 32 bp, Artificial sequence
  Oligonucleotide
gcgcgagctccctctagagagttagatgagcc

SEQ ID NO: 68 - DNA, 28 bp, Artificial sequence
  Oligonucleotide
gcgcctcgagggtattacagccaaaacg

SEQ ID NO: 69 - DNA, 33 bp, Artificial sequence
  Oligonucleotide
ccatcgatgcgaactttacaatgattgatattc

SEQ ID NO: 70 - DNA, 33 bp, Artificial sequence
  Oligonucleotide
gaatatcaatcattgtaaagttcgcatcgatgg

SEQ ID NO: 71 - DNA, 33 bp, Artificial sequence
  Oligonucleotide
ccatcgatgcgaattctacaatgattgatattc

SEQ ID NO: 72 - DNA, 33 bp, Artificial sequence
  Oligonucleotide
gaatatcaatcattgtagaattcgcatcgatgg

SEQ ID NO: 73 - DNA, 32 bp, Artificial sequence
  Oligonucleotide
gaagttgattcagattaaagacaatggcaccg

SEQ ID NO: 74 - DNA, 32 bp, Artificial sequence
  Oligonucleotide
cggtgccattgtctttaatctgaatcaacttc

SEQ ID NO: 75 - DNA, 35 bp, Artificial sequence
  Oligonucleotide
gataacggatcgcgaattaataaagcagacctgcc

SEQ ID NO: 76 - DNA, 35 bp, Artificial sequence
  Oligonucleotide
ggcaggtctgctttattaattcgcgatccgttatc

SEQ ID NO: 77 - DNA, 30 bp, Artificial sequence
  Oligonucleotide
gataacggatctggaaataataaagcagac

SEQ ID NO: 78 - DNA, 30 bp, Artificial sequence
  Oligonucleotide
gtctgctttattatttccagatccgttatc

SEQ ID NO: 79 - DNA, 32 bp, Artificial sequence
  Oligonucleotide
caatggcaccggtatcaagaaagaagatctgg

SEQ ID NO: 80 - DNA, 32 bp, Artificial sequence
  Oligonucleotide
ccagatcttctttcttgataccggtgccattg

SEQ ID NO: 81 - DNA, 32 bp, Artificial sequence
  Oligonucleotide
ctttgaggatttagccggtatttctacctatg

SEQ ID NO: 82 - DNA, 32 bp, Artificial sequence
  Oligonucleotide
cataggtagaaataccggctaaatcctcaaag

SEQ ID NO: 83 - DNA, 32 bp, Artificial sequence
  Oligonucleotide
ggattccgaggaaaggctttagccagtatctc

SEQ ID NO: 84 - DNA, 32 bp, Artificial sequence
  Oligonucleotide
gagatactggctaaagcctttcctcggaatcc

SEQ ID NO: 85 - DNA, 34 bp, Artificial sequence
  Oligonucleotide
gaagctttagcaagtagatctcatgtggcaagag

SEQ ID NO: 86 - DNA, 34 bp, Artificial sequence; identical to SEQ ID NO: 85
  Oligonucleotide

SEQ ID NO: 87 - DNA, 32 bp, Artificial sequence
  Oligonucleotide
gagtcacagtaacgcgtaaagttaaagaagac

SEQ ID NO: 88 - DNA, 32 bp, Artificial sequence
  Oligonucleotide
gtcttctttaactttacgcgttactgtgactc

SEQ ID NO: 89 - DNA, 33 bp, Artificial sequence
  Oligonucleotide
ccaggataggatttgtacagtgttcaataaatc

SEQ ID NO: 90 - DNA, 33 bp, Artificial sequence
  Oligonucleotide
gatttattgaacactgtacaaatcctatcctgg

SEQ ID NO: 91 - DNA, 33 bp, Artificial sequence
  Oligonucleotide
gataggattaggacaatattcaataaatctgtg

SEQ ID NO: 92 - DNA, 33 bp, Artificial sequence
  Oligonucleotide
cacagatttattgaatattgtcctaatcctatc

SEQ ID NO: 93 - DNA, 33 bp, Artificial sequence
  Oligonucleotide
tttttttcattaataattgtctagtgacatgtg

SEQ ID NO: 94 - DNA, 33 bp, Artificial sequence
  Oligonucleotide
cacatgtcactagacaattattaatgaaaaaaa

SEQ ID NO: 95 - DNA, 33 bp, Artificial sequence
  Oligonucleotide
tttttttcattaataatcacctagtgacatgtg

SEQ ID NO: 96 - DNA, 33 bp, Artificial sequence
  Oligonucleotide
cacatgtcactaggtgattattaatgaaaaaaa

SEQ ID NO: 97 - DNA, 31 bp, Artificial sequence
  Oligonucleotide
gagatcatagagaaagcggccaatcaattgc

SEQ ID NO: 98 - DNA, 31 bp, Artificial sequence
  Oligonucleotide
gcaattgattggccgctttctctatgatctc

SEQ ID NO: 99 - DNA, 31 bp, Artificial sequence
  Oligonucleotide
gagatcatagagaaagtcgcgaatcaattgc

SEQ ID NO: 100 - DNA, 31 bp, Artificial sequence
  Oligonucleotide
gcaattgattcgcgactttctctatgatctc

SEQ ID NO: 101 - DNA, 30 bp, Artificial sequence
  Oligonucleotide
gattagccgctattcttcatgacttaaagc

SEQ ID NO: 102 - DNA, 30 bp, Artificial sequence
  Oligonucleotide
gctttaagtcatgaagaatagcggctaatc

SEQ ID NO: 103 - DNA, 34 bp, Artificial sequence
  Oligonucleotide
ccattttttatatatcccttaggtaaagaagttg

SEQ ID NO: 104 - DNA, 34 bp, Artificial sequence
  Oligonucleotide
caacttctttacctaagggatatataaaaaatgg

SEQ ID NO: 105 - DNA, 36 bp, Artificial sequence
  Oligonucleotide
gtattttaagagagattacattgctctatatacctg

SEQ ID NO: 106 - DNA, 36 bp, Artificial sequence
  Oligonucleotide
caggtatatagagcaatgtaatctctcttaaaatac

SEQ ID NO: 107 - DNA, 29 bp, Artificial sequence
  Oligonucleotide
caaaatccattcgatagcaacaatttagc

SEQ ID NO: 108 - DNA, 29 bp, Artificial sequence
  Oligonucleotide
gctaaattgttgctatcgaatggattttg

SEQ ID NO: 109 - DNA, 21 bp, Artificial sequence
  Oligonucleotide
gacgacacaatgccatatagg

SEQ ID NO: 110 - DNA, 20 bp, Artificial sequence
  Oligonucleotide
agacattgcttattgatagg

SEQ ID NO: 111 - DNA, 40 bp, Artificial sequence
  Oligonucleotide
cctatcaataagcaatgtctttcgtggcaggggttattcg

SEQ ID NO: 112 - DNA, 40 bp, Artificial sequence
  Oligonucleotide
cgtatcgcccgacaacatccaaaattttcccatattcttc

SEQ ID NO: 113 - DNA, 19 bp, Artificial sequence
  Oligonucleotide
gatgttgtcgggcgatacg

SEQ ID NO: 114 - DNA, 30 bp, Artificial sequence
  Oligonucleotide
cagtttagacgtcgtgaacctttcacatac

SEQ ID NO: 115 - DNA, 24 bp, Artificial sequence
  Oligonucleotide
gaactgtatcgatgcaaaatccac

SEQ ID NO: 116 - DNA, 29 bp, Artificial sequence
  Oligonucleotide
gccatatgatgctctgtatgcacactttc

SEQ ID NO: 117 - DNA, 25 bp, Artificial sequence
  Oligonucleotide
gttcacgacgtctaaactgcagtcc

SEQ ID NO: 118 - DNA, 32 bp, Artificial sequence
  Oligonucleotide
ggggctttccaacatttttccatctgagtaac

SEQ ID NO: 119 - DNA, 21 bp, Artificial sequence
  Oligonucleotide
ggaaaaatgttggaaagcccc

SEQ ID NO: 120 - DNA, 29 bp, Artificial sequence
  Oligonucleotide
gacctaaggagagaaggatcattaacctc

SEQ ID NO: 121 - DNA, 25 bp, Artificial sequence
  Oligonucleotide
cacctcgagaaagaagaacacatcc

SEQ ID NO: 122 - DNA, 40 bp, Artificial sequence
  Oligonucleotide
ggagattatacaatacgatgtcaaatagcggtgctggctc

SEQ ID NO: 123 - DNA, 19 bp, Artificial sequence
  Oligonucleotide
atcgtattgtataatctcc

SEQ ID NO: 124 - protein, 966 aa, Saccharomyces cerevisiae
MSSTRPELKFSDVSEERNFYKKYTGLPKKPLKTIRLVDKGDYYTVIGSDAIFVADSVYHTQSVLKNCQLDPVTAKNFHEPTKYVTVSLQVLATLLKLCLLDLGYKVEIYDKGWKLIKSASPGNIEQVNELMNMNIDSSIIIASLKVQWNSQDGNCIIGVAFIDTTAYKVGMLDIVDNEVYSNLESFLIQLGVKECLVQDLTSNSNSNAEMQKVINVIDRCGCVVTLLKNSEFSEKDVELDLTKLLGDDLALSLPQKYSKLSMGACNALIGYLQLLSEQDQVGKYELVEHKLKEFMKLDASAIKALNLFPQGPQNPFGSNNLAVSGFTSAGNSGKVTSLFQLLNHCKTNAGVRLLNEWLKQPLTNIDEINKRHDLVDYLIDQIELRQMLTSEYLPMIPDIRRLTKKLNKRGNLEDVLKIYQFSKRIPEIVQVFTSFLEDDSPTEPVNELVRSVWLAPLSHHVEPLSKFEEMVETTVDLDAYEENNEFMIKVEFNEELGKIRSKLDTLRDEIHSIHLDSAEDLGFDPDKKLKLENHHLHGWCMRLTRNDAKELRKHKKYIELSTVKAGIFFSTKQLKSIANETNILQKEYDKQQSALVREIINITLTYTPVFEKLSLVLAHLDVIASFAHTSSYAPIPYIRLKLHPMDSERRTHLISSRHPVLEMQDDISFISNDVTLESGKGDFLIITGPNMGGKSTYIRQVGVISLMAQIGCFVPCEEAEIAIVDAILCRVGAGDSQLKGVSTFMVEILETASILKNASKNSLIIVDELGRGTSTYDGFGLAWAIAEHIASKIGCFALFATHFHELTELSEKLPNVKNMHVVAHIEKNLKEQKHDDEDITLLYKVEPGISDQSFGIHVAEVVQFPEKIVKMAKRKANELDDLKTNNEDLKKAKLSLQEVNEGNIRLKALLKEWIRKVKEEGLHDPSKITEEASQHKIQELLRAIANEPEKENDNYLEIYKSPCCYN

SEQ ID NO: 125 - protein, 966 aa, Saccharomyces cerevisiae
MSSTRPELKFSDVSEERNFYKKYTGLPKKPLKTIRLVDKGDYYTVIGSDAIFVADSVYHTQSVLKNCQLDPVTAKNFHEPTKYVTVSLQVLATLLKLCLLDLGYKVEIYDKGWKLIKSASPGNIEQVNELMNMNIDSSIIIASLKVQWNSQDGNCIIGVAFIDTTAYKVGMLDIVDNEVYSNLESFLIQLGVKECLVQDLTSNSNSNAEMQKVINVIDRCGCVVTLLKNSEFSEKDVELDLTKLLGDDLALSLPQKYSKLSMGACNALIGYLQLLSEQDQVGKYELVEHKLKEFMKLDASAIKALNLFPQGPQNPFGSNNLAVSGFTSAGNSGKVTSLFQLLNHCKTNAGVRLLNEWLKQPLTNIDEINKRHDLVDYLIDQIELRQMLTSEYLPMIPDIRRLTKKLNKRGNLEDVLKIYQFSKRIPEIVQVFTSFLEDDSPTEPVNELVRSVWLAPLSHHVEPLSKFEEMVETTVDLDAYEENNEFMIKVEFNEELGKIRSKLDTLRDEIHSIHLDSAEDLGFDPDKKLKLENHHLHGWCMRLTRNDAKELRKHKKYIELSTVKAGIFFSTKQLKSIANETNILQKEYDKQQSALVREIINITLTYTPVFEKLSLVLAHLDVIASFAHTSSYAPIPYIRPKLHPMDSERRTHLISSRYPVLEMQDDISFISNDVTLESGKGDFLIITGPNMGGKSTYIRQVGVISLMAQIGCFVPCEEAEIAIVDAILCRVGAGDSQLKGVSTFMVEILETASILKNASKNSLIIVDELGRGTSTYDGFGLAWAIAEHIASKIGCFALFATHFHELTELSEKLPNVKNMHVVAHIEKNLKEQKHDDEDITLLYKVEPGISDQSFGIHVAEVVQFPEKIVKMAKRKANELDDLKTNNEDLKKAKLSLQEVNEGNIRLKALLKEWIRKVKEEGLHDPSKITEEASQHKIQELLRAIANEPEKENDNYLEIYKSPCCYN

SEQ ID NO: 126 - protein, 756 aa, Homo sapiens
MSFVAGVIRRLDETVVNRIAAGEVIQRPANAIKEMIENCLDAKFTSIQVIVKEGGLKLIQIQDNGTGIRKEDLDIVCERFTTSKLQSFEDLASISTYGFRGEALASISHVAHVTITTKTADGKCAYRASYSDGKLKAPPKPCAGNQGTQITVEDLFYNIATRRKALKNPSEEYGKILEVVGRYSVHNAGISFSVKKQGETVADVRTLPNASTVDNIRSVFGNAVSRELIEIGCEDKTLAFKMNGYISNANYSVKKCIFLLFINHRLVESTSLRKAIETVYAAYLPKNTHPFLYLSLEISPQNVDVNVHPTKHEVHFLHEESILERVQQHIESKLLGSNSSRMYFTQTLLPGLAGPSGEMVKSTTSLTSSSTSGSSDKVYAHQMVRTDSREQKLDAFLQPLSKPLSSQPQAIVTEDKTDISSGRARQQDEEMLELPAPAEVAAKNQSLEGDTTKGTSEMSEKRGPTSSNPRKRHREDSDVEMVEDDSRKEMTAACTPRRRIINLTSVLSLQEEINEQGHEVLREMLHNHSFVGCVNPQWALAQHQTKLYLLNTTKLSEELFYQILIYDFANFGVLRLSEPAPLFDLAMLALDSPESGWTEEDGPKEGLAEYIVEFLKKKAEMLADYFSLEIDEEGNLIGLPLLIDNYVPPLEGLPIFILRLATEVNWDEEKECFESLSKECAMFYSIRKQYISEESTLSGQQSEVPGSIPNSWKWTVEHIVYKALRSHILPPKHFTEDGNILQLANLPDLYKVFERC

SEQ ID NO: 127 - protein, 756 aa, Homo sapiens
MSFVAGVIRRLDETVVNRIAAGEVIQRPANAIKEMIENCLDAKSTSIQVIVKEGGLKLIQIQDNGTGIRKEDLDIVCERFTTSKLQSFEDLASISTYGFRGEALASISHVAHVTITTKTADGKCAYRASYSDGKLKAPPKPCAGNQGTQITVEDLFYNIATRRKALKNPSEEYGKILEVVGRYSVHNAGISFSVKKQGETVADVRTLPNASTVDNIRSVFGNAVSRELIEIGCEDKTLAFKMNGYISNANYSVKKCIFLLFINHRLVESTSLRKAIETVYAAYLPKNTHPFLYLSLEISPQNVDVNVHPTKHEVHFLHEESILERAQQHIESKLLGSNSSRMYFTQTLLPGLAGPSGEMVKSTTSLTSSSTSGSSDKVYAHQMVRTDSREQKLDAFLQPLSKPLSSQPQAIVTEDKTDISSGRARQQDEEMLELPAPAEVAAKNQSLEGDTTKGTSEMSEKRGPTSSNPRKRHREDSDVEMVEDDSRKEMTAACTPRRRIINLTSVLSLQEEINEQGHEVLREMLHNHSFVGCVNPQWALAQHQTKLYLLNTTKLSEELFYQILIYDFANFGVLRLSEPAPLFDLAMLALDSPESGWTEEDGPKEGLAEYIVEFLKKKAEMLADYFSLEIDEEGNLIGLPLLIDNYVPPLEGLPIFILRLATEVNWDEEKECFESLSKECAMFYSIRKQYISEESTLSGQQSEVPGSIPNSWKWTVEHIVYKALRSHILPPKHFTEDGNILQLANLPDLYKVFERC

SEQ ID NO: 128 - protein, 769 aa, Artificial sequence
  human-yeast hybrid MLH1 protein
MSLRIKALDASVVNKIAAGEIIISPVNALKEMMENSIDANATMIDILVKEGGIKVLQITDNGSGINKADLPILCERFTTSKLQSFEDLASISTYGFRGEALASISHVAHVTITTKTADGKCAYRASYSDGKLKAPPKPCAGNQGTQITVEDLFYNIATRRKALKNPSEEYGKILDVVGRYAIHSKDIGFSCKKFGDSNYSLSVKPSYTVQDRIRTVFNKSVASNLITFHISKVEDLNLESVDGKVCNLNFISKKSISLIFFINNRLVTCDLLRRALNSVYSNYLPKGFRPFIYLGIVIDPAAVDVNVHPTKREVRFLSQDEIIEKIANQLHAELSAIDTSRTFKASSISTNKPESLIPFNDTIESDRNRKSLRQAQVVENSYTTANSQLRKAKRQENKLVRIDASQAKITSFLSSSQQFNFEGSSTKRQLSEPKVTNVSHSQEAEKLTLNESEQPRDANTINDNDLKDQPKKKQKLGDYKVPSIADDEKNALPISKDGYIRVPKERVNVNLTSIKKLREKVDDSIHRELTDIFANLNYVGVVDEERRLAAIQHDLKLFLIDYGSVCYELFYQIGLTDFANFGKINLQSTNVSDDIVLYNLLSEFDELNDDASKEKIISKIWDMSSMLNEYYSIELVNDGLDNDLKSVKLKSLPLLLKGYIPSLVKLPFFIYRLGKEVDWEDEQECLDGILREIALLYIPDMVPKVDTLDASLSEDEKAQFINRKEHISSLLEHVLFPCIKRRFLAPRHILKDVVEIANLPDLYKVFERC

SEQ ID NO: 129 - protein, 956 aa, Artificial sequence
  human-yeast hybrid MSH2 protein
MSSTRPELKFSDVSEERNFYKKYTGLPKKPLKTIRLVDKGDYYTVIGSDAIFVADSVYHTQSVLKNCQLDPVTAKNFHEPTKYVTVSLQVLATLLKLCLLDLGYKVEIYDKGWKLIKSASPGNIEQVNELMNMNIDSSIIIASLKVQWNSQDGNCIIGVAFIDTTAYKVGMLDIVDNEVYSNLESFLIQLGVKECLVQDLTSNSNSNAEMQKVINVIDRCGCVVTLLKNSEFSEKDVELDLTKLLGDDLALSLPQKYSKLSMGACNALIGYLQLLSEQDQVGKYELVEHKLKEFMKLDASAIKALNLFPQGPQNPFGSNNLAVSGFTSAGNSGKVTSLFQLLNHCKTNAGVRLLNEWLKQPLTNIDEINKRHDLVDYLIDQIELRQMLTSEYLPMIPDIRRLTKKLNKRGNLEDVLKIYQFSKRIPEIVQVFTSFLEDDSPTEPVNELVRSVWLAPLSHHVEPLSKFEEMVETTVDLDAYEENNEFMIKVEFNEELGKIRSKLDTLRDEIHSIHLDSAEDLGFDPDKKLKLENHHLHGWCMRLTRNDAKELRKHKKYIELSTVKAGIFFSTKQLKSIANETNILQKEYDKQQSALVREIINITLTYTPVFEKLSLVLAHLDVIASFAHTSSYAPIPYIRPAILEKGQGRIILKASRHACVEVQDEIAFIPNDVYFEKDKQMFHIITGPNMGGKSTYIRQTGVIVLMAQIGCFVPCESAEVSIVDCILARVGAGDSQLKGVSTFMAEMLETASILRSATKDSLIIIDELGRGTSTYDGFGLAWAISEYIATKIGAFCMFATHFHELTALANQIPTVNNLHVTALTTEETLTMLYQVKKGVCDQSFGIHVAEVVQFPEKIVKMAKRKANELDDLKTNNEDLKKAKLSLQEVNEGNIRLKALLKEWIRKVKEEGLHDPSKITEEASQHKIQELLRAIANEPEKENDNYLEIYKSPCCYN

SEQ ID NO: 130 - DNA, 44 bp, Artificial sequence
  Oligonucleotide
tatgctcctataccatacattcggccggccattttggagaaagg

SEQ ID NO: 131 - DNA, 46 bp, Artificial sequence
  Oligonucleotide
attttttctggaaattgtacaacctctgcaacatgaatcccaaaac

SEQ ID NO: 132 - DNA, 18 bp, Artificial sequence
  Oligonucleotide
tggcattatcgttaccac

SEQ ID NO: 133 - DNA, 21 bp, Artificial sequence
  Oligonucleotide
aatgtatggtataggagcata

SEQ ID NO: 134 - DNA, 23 bp, Artificial sequence
  Oligonucleotide
gttgtacaatttccagaaaaaat

SEQ ID NO: 135 - DNA, 30 bp, Artificial sequence
  Oligonucleotide
gcgcctcgagtcacttaagatgtcgttgta

SEQ ID NO: 136 - DNA, 34 bp, Artificial sequence
  Oligonucleotide
gctgcaggtgagatctttatatcccccgtaaatg

SEQ ID NO: 137 - DNA, 34 bp, Artificial sequence; identical to SEQ ID NO: 136
  Oligonucleotide

SEQ ID NO: 138 - DNA, 34 bp, Artificial sequence
  Oligonucleotide
gctgcaggtgagatcacgatatcccccgtaaatg

SEQ ID NO: 139 - DNA, 34 bp, Artificial sequence; identical to SEQ ID NO: 138
  Oligonucleotide

SEQ ID NO: 140 - DNA, 33 bp, Artificial sequence
  Oligonucleotide
ggtgagatcataatatcactagtaaatgctctc

SEQ ID NO: 141 - DNA, 33 bp, Artificial sequence; identical to SEQ ID NO: 140
  Oligonucleotide

SEQ ID NO: 142 - DNA, 34 bp, Artificial sequence
  Oligonucleotide
caaataacagatagtggatctggaattaataaag

SEQ ID NO: 143 - DNA, 34 bp, Artificial sequence; identical to SEQ ID NO: 142
  Oligonucleotide

SEQ ID NO: 144 - DNA, 36 bp, Artificial sequence
  Oligonucleotide
gtgagcgattcacgatatccaaattacaaaaattcg

SEQ ID NO: 145 - DNA, 36 bp, Artificial sequence; identical to SEQ ID NO: 144
  Oligonucleotide

SEQ ID NO: 146 - DNA, 36 bp, Artificial sequence; identical to SEQ ID NO: 144
  Oligonucleotide

SEQ ID NO: 147 - DNA, 36 bp, Artificial sequence; identical to SEQ ID NO: 144
  Oligonucleotide

SEQ ID NO: 148 - DNA, 34 bp, Artificial sequence
  Oligonucleotide
gtatctcacatgtggtacgcgtcacagtaacgac

SEQ ID NO: 149 - DNA, 34 bp, Artificial sequence; identical to SEQ ID NO: 148
  Oligonucleotide

SEQ ID NO: 150 - DNA, 33 bp, Artificial sequence
  Oligonucleotide
gataggattcgaactctgttcaataaatctgtg

SEQ ID NO: 151 - DNA, 33 bp, Artificial sequence; identical to SEQ ID NO: 150
  Oligonucleotide

SEQ ID NO: 152 - DNA, 37 bp, Artificial sequence
  Oligonucleotide
ccatttcattaatttttttcaataataggctagtgac

SEQ ID NO: 153 - DNA, 37 bp, Artificial sequence; identical to SEQ ID NO: 152
  Oligonucleotide

SEQ ID NO: 154 - DNA, 37 bp, Artificial sequence
  Oligonucleotide
ccatctctggtcaagcggccattttttatatatcgcc

SEQ ID NO: 155 - DNA, 37 bp, Artificial sequence; identical to SEQ ID NO: 154
  Oligonucleotide

SEQ ID NO: 156 - DNA, 35 bp, Artificial sequence
  Oligonucleotide
ctctggtcaagcttctattttttatatatcgcctg

SEQ ID NO: 157 - DNA, 35 bp, Artificial sequence; identical to SEQ ID NO: 156
  Oligonucleotide

SEQ ID NO: 158 - DNA, 34 bp, Artificial sequence
  Oligonucleotide
ccattttttatatatctcctaggtaaagaagttg

SEQ ID NO: 159 - DNA, 34 bp, Artificial sequence; identical to SEQ ID NO: 158
  Oligonucleotide

SEQ ID NO: 160 - DNA, 32 bp, Artificial sequence
  Oligonucleotide
cctgggtaaagacgtcgattgggaggatgaac

SEQ ID NO: 161 - DNA, 32 bp, Artificial sequence; identical to SEQ ID NO: 160
  Oligonucleotide

SEQ ID NO: 162 - DNA, 34 bp, Artificial sequence
  Oligonucleotide
tatcctcattactagaatacgtcctcttcccttg

SEQ ID NO: 163 - DNA, 34 bp, Artificial sequence; identical to SEQ ID NO: 162
  Oligonucleotide

SEQ ID NO: 164 - DNA, 32 bp, Artificial sequence
  Oligonucleotide
gtatcaaacgaaggttcgtggcccctagacac

SEQ ID NO: 165 - DNA, 32 bp, Artificial sequence; identical to SEQ ID NO: 164
  Oligonucleotide

SEQ ID NO: 166 - DNA, 33 bp, Artificial sequence
  Oligonucleotide
ccaccttccggatctatacagagtttttgagag

SEQ ID NO: 167 - DNA, 33 bp, Artificial sequence; identical to SEQ ID NO: 166
  Oligonucleotide

SEQ ID NO: 168 - DNA, 24 bp, Artificial sequence
  Oligonucleotide
caaagtttttgagtggtgtaaact

SEQ ID NO: 169 - DNA, 24 bp, Artificial sequence
  Oligonucleotide
caaagtttttgagtggtgtaaact

SEQ ID NO: 170 - DNA, 32 bp, Artificial sequence
  Oligonucleotide
atggttggtgcatgccgttgacacgtaatgac

SEQ ID NO: 171 - DNA, 32 bp, Artificial sequence; identical to SEQ ID NO: 170
  Oligonucleotide

SEQ ID NO: 172 - protein, 966 aa, Saccharomyces cerevisiae
MSSTRPELKFSDVSEERNFYKKYTGLPKKPLKTIRLVDKGDYYTVIGSDAIFVADSVYHTQSVLKNCQLDPVTAKNFHEPTKYVTVSLQVLATLLKLCLLDLGYKVEIYDKGWKLIKSASPGNIEQVNELMNMNIDSSIIIASLKVQWNSQDGNCIIGVAFIDTTAYKVGMLDIVDNEVYSNLESFLIQLGVKECLVQDLTSNSNSNAEMQKVINVIDRCGCVVTLLKNSEFSEKDVELDLTKLLGDDLALSLPQKYSKLSMGACNALIGYLQLLSEQDQVGKYELVEHKLKEFMKLDASAIKALNLFPQGPQNPFGSNNLAVSGFTSAGNSGKVTSLFQLLNHCKTNAGVRLLNEWLKQPLTNIDEINKRHDLVDYLIDQIELRQMLTSEYLPMIPDIRRLTKKLNKRGNLEDVLKIYQFSKRIPEIVQVFTSFLEDDSPTEPVNELVRSVWLAPLSHHVEPLSKFEEMVETTVDLDAYEENNEFMIKVEFNEELGKIRSKLDTLRDEIHSIHLDSAEDLGFDPDKKLKLENHHLHGWCMPLTRNDAKELRKHKKYIELSTVKAGIFFSTKQLKSIANETNILQKEYDKQQSALVREIINITLTYTPVFEKLSLVLAHLDVIASFAHTSSYAPIPYIRPKLHPMDSERRTHLISSRHPVLEMQDDISFISNDVTLESGKGDFLIITGPNMGGKSTYIRQVGVISLMAQIGCFVPCEEAEIAIVDAILCRVGAGDSQLKGVSTFMVEILETASILKNASKNSLIIVDELGRGTSTYDGFGLAWAIAEHIASKIGCFALFATHFHELTELSEKLPNVKNMHVVAHIEKNLKEQKHDDEDITLLYKVEPGISDQSFGIHVAEVVQFPEKIVKMAKRKANELDDLKTNNEDLKKAKLSLQEVNEGNIRLKALLKEWIRKVKEEGLHDPSKITEEASQHKIQELLRAIANEPEKENDNYLEIYKSPCCYN

SEQ ID NO: 173 - DNA, 21 bp, Artificial sequence
  Oligonucleotide
cttatatcgtcttgcatttcc

SEQ ID NO: 174 - DNA, 24 bp, Artificial sequence
  Oligonucleotide
gctgcaggtgagatcataatatcc

SEQ ID NO: 175 - DNA, 24 bp, Artificial sequence
  Oligonucleotide
gctgcaggtgagatcataatatcc

SEQ ID NO: 176 - DNA, 28 bp, Artificial sequence
  Oligonucleotide
gcgcggatccatagacctatcaataagc

SEQ ID NO: 177 - DNA, 18 bp, Artificial sequence
  Oligonucleotide
ggagttctcgaagacgag

SEQ ID NO: 178 - DNA, 34 bp, Artificial sequence
  Oligonucleotide
  misc_feature: "n" at positions 17, 18 and 19 refers to any of the four nucleoti des (a, c, g or t) at each position
  misc_feature (17)..(19): "n" at positions 17, 18 and 19 refers to any of the four nucleoti des (a, c, g or t) at each position
ctgtatcgatgcaaaannnacaagtattcaagtg

SEQ ID NO: 179 - protein, 769 aa, Artificial sequence; identical to SEQ ID NO: 41
  human-yeast hybrid MLH1 protein

SEQ ID NO: 180 - protein, 769 aa, Artificial sequence
  human-yeast hybrid MLH1 protein
MSLRIKALDASVVNKIAAGEIIISPVNALKEMMENSIDAKATSIQVIVKEGGLKLIQIQDNGTGIRKEDLDIVCERFTTSKLQKFEDLSQIQTYGFRGEALASISHVARVTVTTKVKEDRCAWRVSYAEGKMLESPKPVAGKDGTTILVEDLFFNIPSRLRALRSHNDEYSKILDVVGRYAIHSKDIGFSCKKFGDSNYSLSVKPSYTVQDRIRTVFNKSVASNLITFHISKVEDLNLESVDGKVCNLNFISKKSISLIFFINNRLVTCDLLRRALNSVYSNYLPKGFRPFIYLGIVIDPAAVDVNVHPTKREVRFLSQDEIIEKIANQLHAELSAIDTSRTFKASSISTNKPESLIPFNDTIESDRNRKSLRQAQVVENSYTTANSQLRKAKRQENKLVRIDASQAKITSFLSSSQQFNFEGSSTKRQLSEPKVTNVSHSQEAEKLTLNESEQPRDANTINDNDLKDQPKKKQKLGDYKVPSIADDEKNALPISKDGYIRVPKERVNVNLTSIKKLREKVDDSIHRELTDIFANLNYVGVVDEERRLAAIQHDLKLFLIDYGSVCYELFYQIGLTDFANFGKINLQSTNVSDDIVLYNLLSEFDELNDDASKEKIISKIWDMSSMLNEYYSIELVNDGLDNDLKSVKLKSLPLLLKGYIPSLVKLPFFIYRLGKEVDWEDEQECLDGILREIALLYIPDMVPKVDTLDASLSEDEKAQFINRKEHISSLLEHVLFPCIKRRFLAPRHILKDVVEIANLPDLYKVFERC

SEQ ID NO: 181 - protein, 769 aa, Artificial sequence
  human-yeast hybrid MLH1 protein
MSLRIKALDASVVNKIAAGEIIISPVNALKEMMENSIDAKRTSIQVIVKEGGLKLIQIQDNGTGIRKEDLDIVCERFTTSKLQKFEDLSQIQTYGFRGEALASISHVARVTVTTKVKEDRCAWRVSYAEGKMLESPKPVAGKDGTTILVEDLFFNIPSRLRALRSHNDEYSKILDVVGRYAIHSKDIGFSCKKFGDSNYSLSVKPSYTVQDRIRTVFNKSVASNLITFHISKVEDLNLESVDGKVCNLNFISKKSISLIFFINNRLVTCDLLRRALNSVYSNYLPKGFRPFIYLGIVIDPAAVDVNVHPTKREVRFLSQDEIIEKIANQLHAELSAIDTSRTFKASSISTNKPESLIPFNDTIESDRNRKSLRQAQVVENSYTTANSQLRKAKRQENKLVRIDASQAKITSFLSSSQQFNFEGSSTKRQLSEPKVTNVSHSQEAEKLTLNESEQPRDANTINDNDLKDQPKKKQKLGDYKVPSIADDEKNALPISKDGYIRVPKERVNVNLTSIKKLREKVDDSIHRELTDIFANLNYVGVVDEERRLAAIQHDLKLFLIDYGSVCYELFYQIGLTDFANFGKINLQSTNVSDDIVLYNLLSEFDELNDDASKEKIISKIWDMSSMLNEYYSIELVNDGLDNDLKSVKLKSLPLLLKGYIPSLVKLPFFIYRLGKEVDWEDEQECLDGILREIALLYIPDMVPKVDTLDASLSEDEKAQFINRKEHISSLLEHVLFPCIKRRFLAPRHILKDVVEIANLPDLYKVFERC

SEQ ID NO: 182 - protein, 769 aa, Artificial sequence
  human-yeast hybrid MLH1 protein
MSLRIKALDASVVNKIAAGEIIISPVNALKEMMENSIDAKCTSIQVIVKEGGLKLIQIQDNGTGIRKEDLDIVCERFTTSKLQKFEDLSQIQTYGFRGEALASISHVARVTVTTKVKEDRCAWRVSYAEGKMLESPKPVAGKDGTTILVEDLFFNIPSRLRALRSHNDEYSKILDVVGRYAIHSKDIGFSCKKFGDSNYSLSVKPSYTVQDRIRTVFNKSVASNLITFHISKVEDLNLESVDGKVCNLNFISKKSISLIFFINNRLVTCDLLRRALNSVYSNYLPKGFRPFIYLGIVIDPAAVDVNVHPTKREVRFLSQDEIIEKIANQLHAELSAIDTSRTFKASSISTNKPESLIPFNDTIESDRNRKSLRQAQVVENSYTTANSQLRKAKRQENKLVRIDASQAKITSFLSSSQQFNFEGSSTKRQLSEPKVTNVSHSQEAEKLTLNESEQPRDANTINDNDLKDQPKKKQKLGDYKVPSIADDEKNALPISKDGYIRVPKERVNVNLTSIKKLREKVDDSIHRELTDIFANLNYVGVVDEERRLAAIQHDLKLFLIDYGSVCYELFYQIGLTDFANFGKINLQSTNVSDDIVLYNLLSEFDELNDDASKEKIISKIWDMSSMLNEYYSIELVNDGLDNDLKSVKLKSLPLLLKGYIPSLVKLPFFIYRLGKEVDWEDEQECLDGILREIALLYIPDMVPKVDTLDASLSEDEKAQFINRKEHISSLLEHVLFPCIKRRFLAPRHILKDVVEIANLPDLYKVFERC

SEQ ID NO: 183 - protein, 769 aa, Artificial sequence
  human-yeast hybrid MLH1 protein
MSLRIKALDASVVNKIAAGEIIISPVNALKEMMENSIDAKQTSIQVIVKEGGLKLIQIQDNGTGIRKEDLDIVCERFTTSKLQKFEDLSQIQTYGFRGEALASISHVARVTVTTKVKEDRCAWRVSYAEGKMLESPKPVAGKDGTTILVEDLFFNIPSRLRALRSHNDEYSKILDVVGRYAIHSKDIGFSCKKFGDSNYSLSVKPSYTVQDRIRTVFNKSVASNLITFHISKVEDLNLESVDGKVCNLNFISKKSISLIFFINNRLVTCDLLRRALNSVYSNYLPKGFRPFIYLGIVIDPAAVDVNVHPTKREVRFLSQDEIIEKIANQLHAELSAIDTSRTFKASSISTNKPESLIPFNDTIESDRNRKSLRQAQVVENSYTTANSQLRKAKRQENKLVRIDASQAKITSFLSSSQQFNFEGSSTKRQLSEPKVTNVSHSQEAEKLTLNESEQPRDANTINDNDLKDQPKKKQKLGDYKVPSIADDEKNALPISKDGYIRVPKERVNVNLTSIKKLREKVDDSIHRELTDIFANLNYVGVVDEERRLAAIQHDLKLFLIDYGSVCYELFYQIGLTDFANFGKINLQSTNVSDDIVLYNLLSEFDELNDDASKEKIISKIWDMSSMLNEYYSIELVNDGLDNDLKSVKLKSLPLLLKGYIPSLVKLPFFIYRLGKEVDWEDEQECLDGILREIALLYIPDMVPKVDTLDASLSEDEKAQFINRKEHISSLLEHVLFPCIKRRFLAPRHILKDVVEIANLPDLYKVFERC

SEQ ID NO: 184 - protein, 769 aa, Artificial sequence
  human-yeast hybrid MLH1 protein
MSLRIKALDASVVNKIAAGEIIISPVNALKEMMENSIDAKHTSIQVIVKEGGLKLIQIQDNGTGIRKEDLDIVCERFTTSKLQKFEDLSQIQTYGFRGEALASISHVARVTVTTKVKEDRCAWRVSYAEGKMLESPKPVAGKDGTTILVEDLFFNIPSRLRALRSHNDEYSKILDVVGRYAIHSKDIGFSCKKFGDSNYSLSVKPSYTVQDRIRTVFNKSVASNLITFHISKVEDLNLESVDGKVCNLNFISKKSISLIFFINNRLVTCDLLRRALNSVYSNYLPKGFRPFIYLGIVIDPAAVDVNVHPTKREVRFLSQDEIIEKIANQLHAELSAIDTSRTFKASSISTNKPESLIPFNDTIESDRNRKSLRQAQVVENSYTTANSQLRKAKRQENKLVRIDASQAKITSFLSSSQQFNFEGSSTKRQLSEPKVTNVSHSQEAEKLTLNESEQPRDANTINDNDLKDQPKKKQKLGDYKVPSIADDEKNALPISKDGYIRVPKERVNVNLTSIKKLREKVDDSIHRELTDIFANLNYVGVVDEERRLAAIQHDLKLFLIDYGSVCYELFYQIGLTDFANFGKINLQSTNVSDDIVLYNLLSEFDELNDDASKEKIISKIWDMSSMLNEYYSIELVNDGLDNDLKSVKLKSLPLLLKGYIPSLVKLPFFIYRLGKEVDWEDEQECLDGILREIALLYIPDMVPKVDTLDASLSEDEKAQFINRKEHISSLLEHVLFPCIKRRFLAPRHILKDVVEIANLPDLYKVFERC

SEQ ID NO: 185 - protein, 769 aa, Artificial sequence
  human-yeast hybrid MLH1 protein
MSLRIKALDASVVNKIAAGEIIISPVNALKEMMENSIDAKITSIQVIVKEGGLKLIQIQDNGTGIRKEDLDIVCERFTTSKLQKFEDLSQIQTYGFRGEALASISHVARVTVTTKVKEDRCAWRVSYAEGKMLESPKPVAGKDGTTILVEDLFFNIPSRLRALRSHNDEYSKILDVVGRYAIHSKDIGFSCKKFGDSNYSLSVKPSYTVQDRIRTVFNKSVASNLITFHISKVEDLNLESVDGKVCNLNFISKKSISLIFFINNRLVTCDLLRRALNSVYSNYLPKGFRPFIYLGIVIDPAAVDVNVHPTKREVRFLSQDEIIEKIANQLHAELSAIDTSRTFKASSISTNKPESLIPFNDTIESDRNRKSLRQAQVVENSYTTANSQLRKAKRQENKLVRIDASQAKITSFLSSSQQFNFEGSSTKRQLSEPKVTNVSHSQEAEKLTLNESEQPRDANTINDNDLKDQPKKKQKLGDYKVPSIADDEKNALPISKDGYIRVPKERVNVNLTSIKKLREKVDDSIHRELTDIFANLNYVGVVDEERRLAAIQHDLKLFLIDYGSVCYELFYQIGLTDFANFGKINLQSTNVSDDIVLYNLLSEFDELNDDASKEKIISKIWDMSSMLNEYYSIELVNDGLDNDLKSVKLKSLPLLLKGYIPSLVKLPFFIYRLGKEVDWEDEQECLDGILREIALLYIPDMVPKVDTLDASLSEDEKAQFINRKEHISSLLEHVLFPCIKRRFLAPRHILKDVVEIANLPDLYKVFERC

SEQ ID NO: 186 - protein, 769 aa, Artificial sequence
  human-yeast hybrid MLH1 protein
MSLRIKALDASVVNKIAAGEIIISPVNALKEMMENSIDAKLTSIQVIVKEGGLKLIQIQDNGTGIRKEDLDIVCERFTTSKLQKFEDLSQIQTYGFRGEALASISHVARVTVTTKVKEDRCAWRVSYAEGKMLESPKPVAGKDGTTILVEDLFFNIPSRLRALRSHNDEYSKILDVVGRYAIHSKDIGFSCKKFGDSNYSLSVKPSYTVQDRIRTVFNKSVASNLITFHISKVEDLNLESVDGKVCNLNFISKKSISLIFFINNRLVTCDLLRRALNSVYSNYLPKGFRPFIYLGIVIDPAAVDVNVHPTKREVRFLSQDEIIEKIANQLHAELSAIDTSRTFKASSISTNKPESLIPFNDTIESDRNRKSLRQAQVVENSYTTANSQLRKAKRQENKLVRIDASQAKITSFLSSSQQFNFEGSSTKRQLSEPKVTNVSHSQEAEKLTLNESEQPRDANTINDNDLKDQPKKKQKLGDYKVPSIADDEKNALPISKDGYIRVPKERVNVNLTSIKKLREKVDDSIHRELTDIFANLNYVGVVDEERRLAAIQHDLKLFLIDYGSVCYELFYQIGLTDFANFGKINLQSTNVSDDIVLYNLLSEFDELNDDASKEKIISKIWDMSSMLNEYYSIELVNDGLDNDLKSVKLKSLPLLLKGYIPSLVKLPFFIYRLGKEVDWEDEQECLDGILREIALLYIPDMVPKVDTLDASLSEDEKAQFINRKEHISSLLEHVLFPCIKRRFLAPRHILKDVVEIANLPDLYKVFERC

SEQ ID NO: 187 - protein, 769 aa, Artificial sequence
  human-yeast hybrid MLH1 protein
MSLRIKALDASVVNKIAAGEIIISPVNALKEMMENSIDAKFTSIQVIVKEGGLKLIQIQDNGTGIRKEDLDIVCERFTTSKLQKFEDLSQIQTYGFRGEALASISHVARVTVTTKVKEDRCAWRVSYAEGKMLESPKPVAGKDGTTILVEDLFFNIPSRLRALRSHNDEYSKILDVVGRYAIHSKDIGFSCKKFGDSNYSLSVKPSYTVQDRIRTVFNKSVASNLITFHISKVEDLNLESVDGKVCNLNFISKKSISLIFFINNRLVTCDLLRRALNSVYSNYLPKGFRPFIYLGIVIDPAAVDVNVHPTKREVRFLSQDEIIEKIANQLHAELSAIDTSRTFKASSISTNKPESLIPFNDTIESDRNRKSLRQAQVVENSYTTANSQLRKAKRQENKLVRIDASQAKITSFLSSSQQFNFEGSSTKRQLSEPKVTNVSHSQEAEKLTLNESEQPRDANTINDNDLKDQPKKKQKLGDYKVPSIADDEKNALPISKDGYIRVPKERVNVNLTSIKKLREKVDDSIHRELTDIFANLNYVGVVDEERRLAAIQHDLKLFLIDYGSVCYELFYQIGLTDFANFGKINLQSTNVSDDIVLYNLLSEFDELNDDASKEKIISKIWDMSSMLNEYYSIELVNDGLDNDLKSVKLKSLPLLLKGYIPSLVKLPFFIYRLGKEVDWEDEQECLDGILREIALLYIPDMVPKVDTLDASLSEDEKAQFINRKEHISSLLEHVLFPCIKRRFLAPRHILKDVVEIANLPDLYKVFERC

SEQ ID NO: 188 - protein, 769 aa, Artificial sequence; identical to SEQ ID NO: 187
  human-yeast hybrid MLH1 protein

SEQ ID NO: 189 - protein, 769 aa, Artificial sequence
  human-yeast hybrid MLH1 protein
MSLRIKALDASVVNKIAAGEIIISPVNALKEMMENSIDAKTTSIQVIVKEGGLKLIQIQDNGTGIRKEDLDIVCERFTTSKLQKFEDLSQIQTYGFRGEALASISHVARVTVTTKVKEDRCAWRVSYAEGKMLESPKPVAGKDGTTILVEDLFFNIPSRLRALRSHNDEYSKILDVVGRYAIHSKDIGFSCKKFGDSNYSLSVKPSYTVQDRIRTVFNKSVASNLITFHISKVEDLNLESVDGKVCNLNFISKKSISLIFFINNRLVTCDLLRRALNSVYSNYLPKGFRPFIYLGIVIDPAAVDVNVHPTKREVRFLSQDEIIEKIANQLHAELSAIDTSRTFKASSISTNKPESLIPFNDTIESDRNRKSLRQAQVVENSYTTANSQLRKAKRQENKLVRIDASQAKITSFLSSSQQFNFEGSSTKRQLSEPKVTNVSHSQEAEKLTLNESEQPRDANTINDNDLKDQPKKKQKLGDYKVPSIADDEKNALPISKDGYIRVPKERVNVNLTSIKKLREKVDDSIHRELTDIFANLNYVGVVDEERRLAAIQHDLKLFLIDYGSVCYELFYQIGLTDFANFGKINLQSTNVSDDIVLYNLLSEFDELNDDASKEKIISKIWDMSSMLNEYYSIELVNDGLDNDLKSVKLKSLPLLLKGYIPSLVKLPFFIYRLGKEVDWEDEQECLDGILREIALLYIPDMVPKVDTLDASLSEDEKAQFINRKEHISSLLEHVLFPCIKRRFLAPRHILKDVVEIANLPDLYKVFERC

SEQ ID NO: 190 - protein, 769 aa, Artificial sequence
  human-yeast hybrid MLH1 protein
MSLRIKALDASVVNKIAAGEIIISPVNALKEMMENSIDAKWTSIQVIVKEGGLKLIQIQDNGTGIRKEDLDIVCERFTTSKLQKFEDLSQIQTYGFRGEALASISHVARVTVTTKVKEDRCAWRVSYAEGKMLESPKPVAGKDGTTILVEDLFFNIPSRLRALRSHNDEYSKILDVVGRYAIHSKDIGFSCKKFGDSNYSLSVKPSYTVQDRIRTVFNKSVASNLITFHISKVEDLNLESVDGKVCNLNFISKKSISLIFFINNRLVTCDLLRRALNSVYSNYLPKGFRPFIYLGIVIDPAAVDVNVHPTKREVRFLSQDEIIEKIANQLHAELSAIDTSRTFKASSISTNKPESLIPFNDTIESDRNRKSLRQAQVVENSYTTANSQLRKAKRQENKLVRIDASQAKITSFLSSSQQFNFEGSSTKRQLSEPKVTNVSHSQEAEKLTLNESEQPRDANTINDNDLKDQPKKKQKLGDYKVPSIADDEKNALPISKDGYIRVPKERVNVNLTSIKKLREKVDDSIHRELTDIFANLNYVGVVDEERRLAAIQHDLKLFLIDYGSVCYELFYQIGLTDFANFGKINLQSTNVSDDIVLYNLLSEFDELNDDASKEKIISKIWDMSSMLNEYYSIELVNDGLDNDLKSVKLKSLPLLLKGYIPSLVKLPFFIYRLGKEVDWEDEQECLDGILREIALLYIPDMVPKVDTLDASLSEDEKAQFINRKEHISSLLEHVLFPCIKRRFLAPRHILKDVVEIANLPDLYKVFERC

SEQ ID NO: 191 - protein, 769 aa, Artificial sequence
  human-yeast hybrid MLH1 protein
MSLRIKALDASVVNKIAAGEIIISPVNALKEMMENSIDAKYTSIQVIVKEGGLKLIQIQDNGTGIRKEDLDIVCERFTTSKLQKFEDLSQIQTYGFRGEALASISHVARVTVTTKVKEDRCAWRVSYAEGKMLESPKPVAGKDGTTILVEDLFFNIPSRLRALRSHNDEYSKILDVVGRYAIHSKDIGFSCKKFGDSNYSLSVKPSYTVQDRIRTVFNKSVASNLITFHISKVEDLNLESVDGKVCNLNFISKKSISLIFFINNRLVTCDLLRRALNSVYSNYLPKGFRPFIYLGIVIDPAAVDVNVHPTKREVRFLSQDEIIEKIANQLHAELSAIDTSRTFKASSISTNKPESLIPFNDTIESDRNRKSLRQAQVVENSYTTANSQLRKAKRQENKLVRIDASQAKITSFLSSSQQFNFEGSSTKRQLSEPKVTNVSHSQEAEKLTLNESEQPRDANTINDNDLKDQPKKKQKLGDYKVPSIADDEKNALPISKDGYIRVPKERVNVNLTSIKKLREKVDDSIHRELTDIFANLNYVGVVDEERRLAAIQHDLKLFLIDYGSVCYELFYQIGLTDFANFGKINLQSTNVSDDIVLYNLLSEFDELNDDASKEKIISKIWDMSSMLNEYYSIELVNDGLDNDLKSVKLKSLPLLLKGYIPSLVKLPFFIYRLGKEVDWEDEQECLDGILREIALLYIPDMVPKVDTLDASLSEDEKAQFINRKEHISSLLEHVLFPCIKRRFLAPRHILKDVVEIANLPDLYKVFERC

SEQ ID NO: 192 - protein, 769 aa, Artificial sequence
  human-yeast hybrid MLH1 protein
MSLRIKALDASVVNKIAAGEIIISPVNALKEMMENSIDAKVTSIQVIVKEGGLKLIQIQDNGTGIRKEDLDIVCERFTTSKLQKFEDLSQIQTYGFRGEALASISHVARVTVTTKVKEDRCAWRVSYAEGKMLESPKPVAGKDGTTILVEDLFFNIPSRLRALRSHNDEYSKILDVVGRYAIHSKDIGFSCKKFGDSNYSLSVKPSYTVQDRIRTVFNKSVASNLITFHISKVEDLNLESVDGKVCNLNFISKKSISLIFFINNRLVTCDLLRRALNSVYSNYLPKGFRPFIYLGIVIDPAAVDVNVHPTKREVRFLSQDEIIEKIANQLHAELSAIDTSRTFKASSISTNKPESLIPFNDTIESDRNRKSLRQAQVVENSYTTANSQLRKAKRQENKLVRIDASQAKITSFLSSSQQFNFEGSSTKRQLSEPKVTNVSHSQEAEKLTLNESEQPRDANTINDNDLKDQPKKKQKLGDYKVPSIADDEKNALPISKDGYIRVPKERVNVNLTSIKKLREKVDDSIHRELTDIFANLNYVGVVDEERRLAAIQHDLKLFLIDYGSVCYELFYQIGLTDFANFGKINLQSTNVSDDIVLYNLLSEFDELNDDASKEKIISKIWDMSSMLNEYYSIELVNDGLDNDLKSVKLKSLPLLLKGYIPSLVKLPFFIYRLGKEVDWEDEQECLDGILREIALLYIPDMVPKVDTLDASLSEDEKAQFINRKEHISSLLEHVLFPCIKRRFLAPRHILKDVVEIANLPDLYKVFERC

SEQ ID NO: 193 - protein, 769 aa, Artificial sequence
  human-yeast hybrid MLH1 protein
MSLRIKAHDASVVNKIAAGEIIISPVNALKEMMENSIDAKSTSIQVIVKEGGLKLIQIQDNGTGIRKEDLDIVCERFTTSKLQKFEDLSQIQTYGFRGEALASISHVARVTVTTKVKEDRCAWRVSYAEGKMLESPKPVAGKDGTTILVEDLFFNIPSRLRALRSHNDEYSKILDVVGRYAIHSKDIGFSCKKFGDSNYSLSVKPSYTVQDRIRTVFNKSVASNLITFHISKVEDLNLESVDGKVCNLNFISKKSISLIFFINNRLVTCDLLRRALNSVYSNYLPKGFRPFIYLGIVIDPAAVDVNVHPTKREVRFLSQDEIIEKIANQLHAELSAIDTSRTFKASSISTNKPESLIPFNDTIESDRNRKSLRQAQVVENSYTTANSQLRKAKRQENKLVRIDASQAKITSFLSSSQQFNFEGSSTKRQLSEPKVTNVSHSQEAEKLTLNESEQPRDANTINDNDLKDQPKKKQKLGDYKVPSIADDEKNALPISKDGYIRVPKERVNVNLTSIKKLREKVDDSIHRELTDIFANLNYVGVVDEERRLAAIQHDLKLFLIDYGSVCYELFYQIGLTDFANFGKINLQSTNVSDDIVLYNLLSEFDELNDDASKEKIISKIWDMSSMLNEYYSIELVNDGLDNDLKSVKLKSLPLLLKGYIPSLVKLPFFIYRLGKEVDWEDEQECLDGILREIALLYIPDMVPKVDTLDASLSEDEKAQFINRKEHISSLLEHVLFPCIKRRFLAPRHILKDVVEIANLPDLYKVFERC

SEQ ID NO: 194 - protein, 769 aa, Artificial sequence
  human-yeast hybrid MLH1 protein
MSLRIKALDASVVNKFAAGEIIISPVNALKEMMENSIDAKSTSIQVIVKEGGLKLIQIQDNGTGIRKEDLDIVCERFTTSKLQKFEDLSQIQTYGFRGEALASISHVARVTVTTKVKEDRCAWRVSYAEGKMLESPKPVAGKDGTTILVEDLFFNIPSRLRALRSHNDEYSKILDVVGRYAIHSKDIGFSCKKFGDSNYSLSVKPSYTVQDRIRTVFNKSVASNLITFHISKVEDLNLESVDGKVCNLNFISKKSISLIFFINNRLVTCDLLRRALNSVYSNYLPKGFRPFIYLGIVIDPAAVDVNVHPTKREVRFLSQDEIIEKIANQLHAELSAIDTSRTFKASSISTNKPESLIPFNDTIESDRNRKSLRQAQVVENSYTTANSQLRKAKRQENKLVRIDASQAKITSFLSSSQQFNFEGSSTKRQLSEPKVTNVSHSQEAEKLTLNESEQPRDANTINDNDLKDQPKKKQKLGDYKVPSIADDEKNALPISKDGYIRVPKERVNVNLTSIKKLREKVDDSIHRELTDIFANLNYVGVVDEERRLAAIQHDLKLFLIDYGSVCYELFYQIGLTDFANFGKINLQSTNVSDDIVLYNLLSEFDELNDDASKEKIISKIWDMSSMLNEYYSIELVNDGLDNDLKSVKLKSLPLLLKGYIPSLVKLPFFIYRLGKEVDWEDEQECLDGILREIALLYIPDMVPKVDTLDASLSEDEKAQFINRKEHISSLLEHVLFPCIKRRFLAPRHILKDVVEIANLPDLYKVFERC

SEQ ID NO: 195 - protein, 769 aa, Artificial sequence
  human-yeast hybrid MLH1 protein
MSLRIKALDASVVNKIAAGEIIISPVNALNEMMENSIDANATMIDILVKEGGIKVLQITDNGSGINKADLPILCERFTTSKLQSFEDLASISTYGFRGEALASISHVAHVTITTKTADGKCAYRASYSDGKMLESPKPVAGKDGTTILVEDLFFNIPSRLRALRSHNDEYSKILDVVGRYAIHSKDIGFSCKKFGDSNYSLSVKPSYTVQDRIRTVFNKSVASNLITFHISKVEDLNLESVDGKVCNLNFISKKSISLIFFINNRLVTCDLLRRALNSVYSNYLPKGFRPFIYLGIVIDPAAVDVNVHPTKREVRFLSQDEIIEKIANQLHAELSAIDTSRTFKASSISTNKPESLIPFNDTIESDRNRKSLRQAQVVENSYTTANSQLRKAKRQENKLVRIDASQAKITSFLSSSQQFNFEGSSTKRQLSEPKVTNVSHSQEAEKLTLNESEQPRDANTINDNDLKDQPKKKQKLGDYKVPSIADDEKNALPISKDGYIRVPKERVNVNLTSIKKLREKVDDSIHRELTDIFANLNYVGVVDEERRLAAIQHDLKLFLIDYGSVCYELFYQIGLTDFANFGKINLQSTNVSDDIVLYNLLSEFDELNDDASKEKIISKIWDMSSMLNEYYSIELVNDGLDNDLKSVKLKSLPLLLKGYIPSLVKLPFFIYRLGKEVDWEDEQECLDGILREIALLYIPDMVPKVDTLDASLSEDEKAQFINRKEHISSLLEHVLFPCIKRRFLAPRHILKDVVEIANLPDLYKVFERC

SEQ ID NO: 196 - protein, 769 aa, Artificial sequence
  human-yeast hybrid MLH1 protein
MSLRIKALDASVVNKIAAGEIIISPVNALKEMMEDSIDAKSTSIQVIVKEGGLKLIQIQDNGTGIRKEDLDIVCERFTTSKLQKFEDLSQIQTYGFRGEALASISHVARVTVTTKVKEDRCAWRVSYAEGKMLESPKPVAGKDGTTILVEDLFFNIPSRLRALRSHNDEYSKILDVVGRYAIHSKDIGFSCKKFGDSNYSLSVKPSYTVQDRIRTVFNKSVASNLITFHISKVEDLNLESVDGKVCNLNFISKKSISLIFFINNRLVTCDLLRRALNSVYSNYLPKGFRPFIYLGIVIDPAAVDVNVHPTKREVRFLSQDEIIEKIANQLHAELSAIDTSRTFKASSISTNKPESLIPFNDTIESDRNRKSLRQAQVVENSYTTANSQLRKAKRQENKLVRIDASQAKITSFLSSSQQFNFEGSSTKRQLSEPKVTNVSHSQEAEKLTLNESEQPRDANTINDNDLKDQPKKKQKLGDYKVPSIADDEKNALPISKDGYIRVPKERVNVNLTSIKKLREKVDDSIHRELTDIFANLNYVGVVDEERRLAAIQHDLKLFLIDYGSVCYELFYQIGLTDFANFGKINLQSTNVSDDIVLYNLLSEFDELNDDASKEKIISKIWDMSSMLNEYYSIELVNDGLDNDLKSVKLKSLPLLLKGYIPSLVKLPFFIYRLGKEVDWEDEQECLDGILREIALLYIPDMVPKVDTLDASLSEDEKAQFINRKEHISSLLEHVLFPCIKRRFLAPRHILKDVVEIANLPDLYKVFERC

SEQ ID NO: 197 - protein, 769 aa, Artificial sequence
  human-yeast hybrid MLH1 protein
MSLRIKALDASVVNKIAAGEIIISPVNALKEMMESSIDANATMIDILVKEGGIKVLQITDNGSGINKADLPILCERFTTSKLQSFEDLASISTYGFRGEALASISHVAHVTITTKTADGKCAYRASYSDGKMLESPKPVAGKDGTTILVEDLFFNIPSRLRALRSHNDEYSKILDVVGRYAIHSKDIGFSCKKFGDSNYSLSVKPSYTVQDRIRTVFNKSVASNLITFHISKVEDLNLESVDGKVCNLNFISKKSISLIFFINNRLVTCDLLRRALNSVYSNYLPKGFRPFIYLGIVIDPAAVDVNVHPTKREVRFLSQDEIIEKIANQLHAELSAIDTSRTFKASSISTNKPESLIPFNDTIESDRNRKSLRQAQVVENSYTTANSQLRKAKRQENKLVRIDASQAKITSFLSSSQQFNFEGSSTKRQLSEPKVTNVSHSQEAEKLTLNESEQPRDANTINDNDLKDQPKKKQKLGDYKVPSIADDEKNALPISKDGYIRVPKERVNVNLTSIKKLREKVDDSIHRELTDIFANLNYVGVVDEERRLAAIQHDLKLFLIDYGSVCYELFYQIGLTDFANFGKINLQSTNVSDDIVLYNLLSEFDELNDDASKEKIISKIWDMSSMLNEYYSIELVNDGLDNDLKSVKLKSLPLLLKGYIPSLVKLPFFIYRLGKEVDWEDEQECLDGILREIALLYIPDMVPKVDTLDASLSEDEKAQFINRKEHISSLLEHVLFPCIKRRFLAPRHILKDVVEIANLPDLYKVFERC

SEQ ID NO: 198 - protein, 769 aa, Artificial sequence
  human-yeast hybrid MLH1 protein
MSLRIKALDASVVNKIAAGEIIISPVNALKEMMENSTDAKSTSIQVIVKEGGLKLIQIQDNGTGIRKEDLDIVCERFTTSKLQKFEDLSQIQTYGFRGEALASISHVARVTVTTKVKEDRCAWRVSYAEGKMLESPKPVAGKDGTTILVEDLFFNIPSRLRALRSHNDEYSKILDVVGRYAIHSKDIGFSCKKFGDSNYSLSVKPSYTVQDRIRTVFNKSVASNLITFHISKVEDLNLESVDGKVCNLNFISKKSISLIFFINNRLVTCDLLRRALNSVYSNYLPKGFRPFIYLGIVIDPAAVDVNVHPTKREVRFLSQDEIIEKIANQLHAELSAIDTSRTFKASSISTNKPESLIPFNDTIESDRNRKSLRQAQVVENSYTTANSQLRKAKRQENKLVRIDASQAKITSFLSSSQQFNFEGSSTKRQLSEPKVTNVSHSQEAEKLTLNESEQPRDANTINDNDLKDQPKKKQKLGDYKVPSIADDEKNALPISKDGYIRVPKERVNVNLTSIKKLREKVDDSIHRELTDIFANLNYVGVVDEERRLAAIQHDLKLFLIDYGSVCYELFYQIGLTDFANFGKINLQSTNVSDDIVLYNLLSEFDELNDDASKEKIISKIWDMSSMLNEYYSIELVNDGLDNDLKSVKLKSLPLLLKGYIPSLVKLPFFIYRLGKEVDWEDEQECLDGILREIALLYIPDMVPKVDTLDASLSEDEKAQFINRKEHISSLLEHVLFPCIKRRFLAPRHILKDVVEIANLPDLYKVFERC

SEQ ID NO: 199 - protein, 769 aa, Artificial sequence
  human-yeast hybrid MLH1 protein
MSLRIKALDASVVNKIAAGEIIISPVNALKEMMENSIGAKSTSIQVIVKEGGLKLIQIQDNGTGIRKEDLDIVCERFTTSKLQKFEDLSQIQTYGFRGEALASISHVARVTVTTKVKEDRCAWRVSYAEGKMLESPKPVAGKDGTTILVEDLFFNIPSRLRALRSHNDEYSKILDVVGRYAIHSKDIGFSCKKFGDSNYSLSVKPSYTVQDRIRTVFNKSVASNLITFHISKVEDLNLESVDGKVCNLNFISKKSISLIFFINNRLVTCDLLRRALNSVYSNYLPKGFRPFIYLGIVIDPAAVDVNVHPTKREVRFLSQDEIIEKIANQLHAELSAIDTSRTFKASSISTNKPESLIPFNDTIESDRNRKSLRQAQVVENSYTTANSQLRKAKRQENKLVRIDASQAKITSFLSSSQQFNFEGSSTKRQLSEPKVTNVSHSQEAEKLTLNESEQPRDANTINDNDLKDQPKKKQKLGDYKVPSIADDEKNALPISKDGYIRVPKERVNVNLTSIKKLREKVDDSIHRELTDIFANLNYVGVVDEERRLAAIQHDLKLFLIDYGSVCYELFYQIGLTDFANFGKINLQSTNVSDDIVLYNLLSEFDELNDDASKEKIISKIWDMSSMLNEYYSIELVNDGLDNDLKSVKLKSLPLLLKGYIPSLVKLPFFIYRLGKEVDWEDEQECLDGILREIALLYIPDMVPKVDTLDASLSEDEKAQFINRKEHISSLLEHVLFPCIKRRFLAPRHILKDVVEIANLPDLYKVFERC

SEQ ID NO: 200 - protein, 769 aa, Artificial sequence
  human-yeast hybrid MLH1 protein
MSLRIKALDASVVNKIAAGEIIISPVNALKEMMENSIDANVTMIDILVKEGGIKVLQITDNGSGINKADLPILCERFTTSKLQSFEDLASISTYGFRGEALASISHVAHVTITTKTADGKCAYRASYSDGKMLESPKPVAGKDGTTILVEDLFFNIPSRLRALRSHNDEYSKILDVVGRYAIHSKDIGFSCKKFGDSNYSLSVKPSYTVQDRIRTVFNKSVASNLITFHISKVEDLNLESVDGKVCNLNFISKKSISLIFFINNRLVTCDLLRRALNSVYSNYLPKGFRPFIYLGIVIDPAAVDVNVHPTKREVRFLSQDEIIEKIANQLHAELSAIDTSRTFKASSISTNKPESLIPFNDTIESDRNRKSLRQAQVVENSYTTANSQLRKAKRQENKLVRIDASQAKITSFLSSSQQFNFEGSSTKRQLSEPKVTNVSHSQEAEKLTLNESEQPRDANTINDNDLKDQPKKKQKLGDYKVPSIADDEKNALPISKDGYIRVPKERVNVNLTSIKKLREKVDDSIHRELTDIFANLNYVGVVDEERRLAAIQHDLKLFLIDYGSVCYELFYQIGLTDFANFGKINLQSTNVSDDIVLYNLLSEFDELNDDASKEKIISKIWDMSSMLNEYYSIELVNDGLDNDLKSVKLKSLPLLLKGYIPSLVKLPFFIYRLGKEVDWEDEQECLDGILREIALLYIPDMVPKVDTLDASLSEDEKAQFINRKEHISSLLEHVLFPCIKRRFLAPRHILKDVVEIANLPDLYKVFERC

SEQ ID NO: 201 - protein, 769 aa, Artificial sequence
  human-yeast hybrid MLH1 protein
MSLRIKALDASVVNKIAAGEIIISPVNALKEMMENSIDANAIMIDILVKEGGIKVLQITDNGSGINKADLPILCERFTTSKLQSFEDLASISTYGFRGEALASISHVAHVTITTKTADGKCAYRASYSDGKMLESPKPVAGKDGTTILVEDLFFNIPSRLRALRSHNDEYSKILDVVGRYAIHSKDIGFSCKKFGDSNYSLSVKPSYTVQDRIRTVFNKSVASNLITFHISKVEDLNLESVDGKVCNLNFISKKSISLIFFINNRLVTCDLLRRALNSVYSNYLPKGFRPFIYLGIVIDPAAVDVNVHPTKREVRFLSQDEIIEKIANQLHAELSAIDTSRTFKASSISTNKPESLIPFNDTIESDRNRKSLRQAQVVENSYTTANSQLRKAKRQENKLVRIDASQAKITSFLSSSQQFNFEGSSTKRQLSEPKVTNVSHSQEAEKLTLNESEQPRDANTINDNDLKDQPKKKQKLGDYKVPSIADDEKNALPISKDGYIRVPKERVNVNLTSIKKLREKVDDSIHRELTDIFANLNYVGVVDEERRLAAIQHDLKLFLIDYGSVCYELFYQIGLTDFANFGKINLQSTNVSDDIVLYNLLSEFDELNDDASKEKIISKIWDMSSMLNEYYSIELVNDGLDNDLKSVKLKSLPLLLKGYIPSLVKLPFFIYRLGKEVDWEDEQECLDGILREIALLYIPDMVPKVDTLDASLSEDEKAQFINRKEHISSLLEHVLFPCIKRRFLAPRHILKDVVEIANLPDLYKVFERC

SEQ ID NO: 202 - protein, 769 aa, Artificial sequence
  human-yeast hybrid MLH1 protein
MSLRIKALDASVVNKIAAGEIIISPVNALKEMMENSIDAKSTSIQAIVKEGGLKLIQIQDNGTGIRKEDLDIVCERFTTSKLQKFEDLSQIQTYGFRGEALASISHVARVTVTTKVKEDRCAWRVSYAEGKMLESPKPVAGKDGTTILVEDLFFNIPSRLRALRSHNDEYSKILDVVGRYAIHSKDIGFSCKKFGDSNYSLSVKPSYTVQDRIRTVFNKSVASNLITFHISKVEDLNLESVDGKVCNLNFISKKSISLIFFINNRLVTCDLLRRALNSVYSNYLPKGFRPFIYLGIVIDPAAVDVNVHPTKREVRFLSQDEIIEKIANQLHAELSAIDTSRTFKASSISTNKPESLIPFNDTIESDRNRKSLRQAQVVENSYTTANSQLRKAKRQENKLVRIDASQAKITSFLSSSQQFNFEGSSTKRQLSEPKVTNVSHSQEAEKLTLNESEQPRDANTINDNDLKDQPKKKQKLGDYKVPSIADDEKNALPISKDGYIRVPKERVNVNLTSIKKLREKVDDSIHRELTDIFANLNYVGVVDEERRLAAIQHDLKLFLIDYGSVCYELFYQIGLTDFANFGKINLQSTNVSDDIVLYNLLSEFDELNDDASKEKIISKIWDMSSMLNEYYSIELVNDGLDNDLKSVKLKSLPLLLKGYIPSLVKLPFFIYRLGKEVDWEDEQECLDGILREIALLYIPDMVPKVDTLDASLSEDEKAQFINRKEHISSLLEHVLFPCIKRRFLAPRHILKDVVEIANLPDLYKVFERC

SEQ ID NO: 203 - protein, 769 aa, Artificial sequence
  human-yeast hybrid MLH1 protein
MSLRIKALDASVVNKIAAGEIIISPVNALKEMMENSIDAKSTSIQVIVIEGGLKLIQIQDNGTGIRKEDLDIVCERFTTSKLQKFEDLSQIQTYGFRGEALASISHVARVTVTTKVKEDRCAWRVSYAEGKMLESPKPVAGKDGTTILVEDLFFNIPSRLRALRSHNDEYSKILDVVGRYAIHSKDIGFSCKKFGDSNYSLSVKPSYTVQDRIRTVFNKSVASNLITFHISKVEDLNLESVDGKVCNLNFISKKSISLIFFINNRLVTCDLLRRALNSVYSNYLPKGFRPFIYLGIVIDPAAVDVNVHPTKREVRFLSQDEIIEKIANQLHAELSAIDTSRTFKASSISTNKPESLIPFNDTIESDRNRKSLRQAQVVENSYTTANSQLRKAKRQENKLVRIDASQAKITSFLSSSQQFNFEGSSTKRQLSEPKVTNVSHSQEAEKLTLNESEQPRDANTINDNDLKDQPKKKQKLGDYKVPSIADDEKNALPISKDGYIRVPKERVNVNLTSIKKLREKVDDSIHRELTDIFANLNYVGVVDEERRLAAIQHDLKLFLIDYGSVCYELFYQIGLTDFANFGKINLQSTNVSDDIVLYNLLSEFDELNDDASKEKIISKIWDMSSMLNEYYSIELVNDGLDNDLKSVKLKSLPLLLKGYIPSLVKLPFFIYRLGKEVDWEDEQECLDGILREIALLYIPDMVPKVDTLDASLSEDEKAQFINRKEHISSLLEHVLFPCIKRRFLAPRHILKDVVEIANLPDLYKVFERC

SEQ ID NO: 204 - protein, 769 aa, Artificial sequence
  human-yeast hybrid MLH1 protein
MSLRIKALDASVVNKIAAGEIIISPVNALKEMMENSIDANATMIDILVEEGGIKVLQITDNGSGINKADLPILCERFTTSKLQSFEDLASISTYGFRGEALASISHVAHVTITTKTADGKCAYRASYSDGKMLESPKPVAGKDGTTILVEDLFFNIPSRLRALRSHNDEYSKILDVVGRYAIHSKDIGFSCKKFGDSNYSLSVKPSYTVQDRIRTVFNKSVASNLITFHISKVEDLNLESVDGKVCNLNFISKKSISLIFFINNRLVTCDLLRRALNSVYSNYLPKGFRPFIYLGIVIDPAAVDVNVHPTKREVRFLSQDEIIEKIANQLHAELSAIDTSRTFKASSISTNKPESLIPFNDTIESDRNRKSLRQAQVVENSYTTANSQLRKAKRQENKLVRIDASQAKITSFLSSSQQFNFEGSSTKRQLSEPKVTNVSHSQEAEKLTLNESEQPRDANTINDNDLKDQPKKKQKLGDYKVPSIADDEKNALPISKDGYIRVPKERVNVNLTSIKKLREKVDDSIHRELTDIFANLNYVGVVDEERRLAAIQHDLKLFLIDYGSVCYELFYQIGLTDFANFGKINLQSTNVSDDIVLYNLLSEFDELNDDASKEKIISKIWDMSSMLNEYYSIELVNDGLDNDLKSVKLKSLPLLLKGYIPSLVKLPFFIYRLGKEVDWEDEQECLDGILREIALLYIPDMVPKVDTLDASLSEDEKAQFINRKEHISSLLEHVLFPCIKRRFLAPRHILKDVVEIANLPDLYKVFERC

SEQ ID NO: 205 - protein, 769 aa, Artificial sequence
  human-yeast hybrid MLH1 protein
MSLRIKALDASVVNKIAAGEIIISPVNALKEMMENSIDAKSTSIQVIVKVGGLKLIQIQDNGTGIRKEDLDIVCERFTTSKLQKFEDLSQIQTYGFRGEALASISHVARVTVTTKVKEDRCAWRVSYAEGKMLESPKPVAGKDGTTILVEDLFFNIPSRLRALRSHNDEYSKILDVVGRYAIHSKDIGFSCKKFGDSNYSLSVKPSYTVQDRIRTVFNKSVASNLITFHISKVEDLNLESVDGKVCNLNFISKKSISLIFFINNRLVTCDLLRRALNSVYSNYLPKGFRPFIYLGIVIDPAAVDVNVHPTKREVRFLSQDEIIEKIANQLHAELSAIDTSRTFKASSISTNKPESLIPFNDTIESDRNRKSLRQAQVVENSYTTANSQLRKAKRQENKLVRIDASQAKITSFLSSSQQFNFEGSSTKRQLSEPKVTNVSHSQEAEKLTLNESEQPRDANTINDNDLKDQPKKKQKLGDYKVPSIADDEKNALPISKDGYIRVPKERVNVNLTSIKKLREKVDDSIHRELTDIFANLNYVGVVDEERRLAAIQHDLKLFLIDYGSVCYELFYQIGLTDFANFGKINLQSTNVSDDIVLYNLLSEFDELNDDASKEKIISKIWDMSSMLNEYYSIELVNDGLDNDLKSVKLKSLPLLLKGYIPSLVKLPFFIYRLGKEVDWEDEQECLDGILREIALLYIPDMVPKVDTLDASLSEDEKAQFINRKEHISSLLEHVLFPCIKRRFLAPRHILKDVVEIANLPDLYKVFERC

SEQ ID NO: 206 - protein, 769 aa, Artificial sequence
  human-yeast hybrid MLH1 protein
MSLRIKALDASVVNKIAAGEIIISPVNALKEMMENSIDAKSTSIQVIVKERGLKLIQIQDNGTGIRKEDLDIVCERFTTSKLQKFEDLSQIQTYGFRGEALASISHVARVTVTTKVKEDRCAWRVSYAEGKMLESPKPVAGKDGTTILVEDLFFNIPSRLRALRSHNDEYSKILDVVGRYAIHSKDIGFSCKKFGDSNYSLSVKPSYTVQDRIRTVFNKSVASNLITFHISKVEDLNLESVDGKVCNLNFISKKSISLIFFINNRLVTCDLLRRALNSVYSNYLPKGFRPFIYLGIVIDPAAVDVNVHPTKREVRFLSQDEIIEKIANQLHAELSAIDTSRTFKASSISTNKPESLIPFNDTIESDRNRKSLRQAQVVENSYTTANSQLRKAKRQENKLVRIDASQAKITSFLSSSQQFNFEGSSTKRQLSEPKVTNVSHSQEAEKLTLNESEQPRDANTINDNDLKDQPKKKQKLGDYKVPSIADDEKNALPISKDGYIRVPKERVNVNLTSIKKLREKVDDSIHRELTDIFANLNYVGVVDEERRLAAIQHDLKLFLIDYGSVCYELFYQIGLTDFANFGKINLQSTNVSDDIVLYNLLSEFDELNDDASKEKIISKIWDMSSMLNEYYSIELVNDGLDNDLKSVKLKSLPLLLKGYIPSLVKLPFFIYRLGKEVDWEDEQECLDGILREIALLYIPDMVPKVDTLDASLSEDEKAQFINRKEHISSLLEHVLFPCIKRRFLAPRHILKDVVEIANLPDLYKVFERC

SEQ ID NO: 207 - protein, 769 aa, Artificial sequence
  human-yeast hybrid MLH1 protein
MSLRIKALDASVVNKIAAGEIIISPVNALKEMMENSIDANATMIDILVKEGRIKVLQITDNGSGINKADLPILCERFTTSKLQSFEDLASISTYGFRGEALASISHVAHVTITTKTADGKCAYRASYSDGKMLESPKPVAGKDGTTILVEDLFFNIPSRLRALRSHNDEYSKILDVVGRYAIHSKDIGFSCKKFGDSNYSLSVKPSYTVQDRIRTVFNKSVASNLITFHISKVEDLNLESVDGKVCNLNFISKKSISLIFFINNRLVTCDLLRRALNSVYSNYLPKGFRPFIYLGIVIDPAAVDVNVHPTKREVRFLSQDEIIEKIANQLHAELSAIDTSRTFKASSISTNKPESLIPFNDTIESDRNRKSLRQAQVVENSYTTANSQLRKAKRQENKLVRIDASQAKITSFLSSSQQFNFEGSSTKRQLSEPKVTNVSHSQEAEKLTLNESEQPRDANTINDNDLKDQPKKKQKLGDYKVPSIADDEKNALPISKDGYIRVPKERVNVNLTSIKKLREKVDDSIHRELTDIFANLNYVGVVDEERRLAAIQHDLKLFLIDYGSVCYELFYQIGLTDFANFGKINLQSTNVSDDIVLYNLLSEFDELNDDASKEKIISKIWDMSSMLNEYYSIELVNDGLDNDLKSVKLKSLPLLLKGYIPSLVKLPFFIYRLGKEVDWEDEQECLDGILREIALLYIPDMVPKVDTLDASLSEDEKAQFINRKEHISSLLEHVLFPCIKRRFLAPRHILKDVVEIANLPDLYKVFERC

SEQ ID NO: 208 - protein, 769 aa, Artificial sequence
  human-yeast hybrid MLH1 protein
MSLRIKALDASVVNKIAAGEIIISPVNALKEMMENSIDAKSTSIQVIVKEGDLKLIQIQDNGTGIRKEDLDIVCERFTTSKLQKFEDLSQIQTYGFRGEALASISHVARVTVTTKVKEDRCAWRVSYAEGKMLESPKPVAGKDGTTILVEDLFFNIPSRLRALRSHNDEYSKILDVVGRYAIHSKDIGFSCKKFGDSNYSLSVKPSYTVQDRIRTVFNKSVASNLITFHISKVEDLNLESVDGKVCNLNFISKKSISLIFFINNRLVTCDLLRRALNSVYSNYLPKGFRPFIYLGIVIDPAAVDVNVHPTKREVRFLSQDEIIEKIANQLHAELSAIDTSRTFKASSISTNKPESLIPFNDTIESDRNRKSLRQAQVVENSYTTANSQLRKAKRQENKLVRIDASQAKITSFLSSSQQFNFEGSSTKRQLSEPKVTNVSHSQEAEKLTLNESEQPRDANTINDNDLKDQPKKKQKLGDYKVPSIADDEKNALPISKDGYIRVPKERVNVNLTSIKKLREKVDDSIHRELTDIFANLNYVGVVDEERRLAAIQHDLKLFLIDYGSVCYELFYQIGLTDFANFGKINLQSTNVSDDIVLYNLLSEFDELNDDASKEKIISKIWDMSSMLNEYYSIELVNDGLDNDLKSVKLKSLPLLLKGYIPSLVKLPFFIYRLGKEVDWEDEQECLDGILREIALLYIPDMVPKVDTLDASLSEDEKAQFINRKEHISSLLEHVLFPCIKRRFLAPRHILKDVVEIANLPDLYKVFERC

SEQ ID NO: 209 - protein, 769 aa, Artificial sequence
  human-yeast hybrid MLH1 protein
MSLRIKALDASVVNKIAAGEIIISPVNALKEMMENSIDAKSTSIQVIVKEGGLELIQIQDNGTGIRKEDLDIVCERFTTSKLQKFEDLSQIQTYGFRGEALASISHVARVTVTTKVKEDRCAWRVSYAEGKMLESPKPVAGKDGTTILVEDLFFNIPSRLRALRSHNDEYSKILDVVGRYAIHSKDIGFSCKKFGDSNYSLSVKPSYTVQDRIRTVFNKSVASNLITFHISKVEDLNLESVDGKVCNLNFISKKSISLIFFINNRLVTCDLLRRALNSVYSNYLPKGFRPFIYLGIVIDPAAVDVNVHPTKREVRFLSQDEIIEKIANQLHAELSAIDTSRTFKASSISTNKPESLIPFNDTIESDRNRKSLRQAQVVENSYTTANSQLRKAKRQENKLVRIDASQAKITSFLSSSQQFNFEGSSTKRQLSEPKVTNVSHSQEAEKLTLNESEQPRDANTINDNDLKDQPKKKQKLGDYKVPSIADDEKNALPISKDGYIRVPKERVNVNLTSIKKLREKVDDSIHRELTDIFANLNYVGVVDEERRLAAIQHDLKLFLIDYGSVCYELFYQIGLTDFANFGKINLQSTNVSDDIVLYNLLSEFDELNDDASKEKIISKIWDMSSMLNEYYSIELVNDGLDNDLKSVKLKSLPLLLKGYIPSLVKLPFFIYRLGKEVDWEDEQECLDGILREIALLYIPDMVPKVDTLDASLSEDEKAQFINRKEHISSLLEHVLFPCIKRRFLAPRHILKDVVEIANLPDLYKVFERC

SEQ ID NO: 210 - protein, 769 aa, Artificial sequence
  human-yeast hybrid MLH1 protein
MSLRIKALDASVVNKIAAGEIIISPVNALKEMMENSIDAKSTSIQVIVKEGGLKLIPIQDNGTGIRKEDLDIVCERFTTSKLQKFEDLSQIQTYGFRGEALASISHVARVTVTTKVKEDRCAWRVSYAEGKMLESPKPVAGKDGTTILVEDLFFNIPSRLRALRSHNDEYSKILDVVGRYAIHSKDIGFSCKKFGDSNYSLSVKPSYTVQDRIRTVFNKSVASNLITFHISKVEDLNLESVDGKVCNLNFISKKSISLIFFINNRLVTCDLLRRALNSVYSNYLPKGFRPFIYLGIVIDPAAVDVNVHPTKREVRFLSQDEIIEKIANQLHAELSAIDTSRTFKASSISTNKPESLIPFNDTIESDRNRKSLRQAQVVENSYTTANSQLRKAKRQENKLVRIDASQAKITSFLSSSQQFNFEGSSTKRQLSEPKVTNVSHSQEAEKLTLNESEQPRDANTINDNDLKDQPKKKQKLGDYKVPSIADDEKNALPISKDGYIRVPKERVNVNLTSIKKLREKVDDSIHRELTDIFANLNYVGVVDEERRLAAIQHDLKLFLIDYGSVCYELFYQIGLTDFANFGKINLQSTNVSDDIVLYNLLSEFDELNDDASKEKIISKIWDMSSMLNEYYSIELVNDGLDNDLKSVKLKSLPLLLKGYIPSLVKLPFFIYRLGKEVDWEDEQECLDGILREIALLYIPDMVPKVDTLDASLSEDEKAQFINRKEHISSLLEHVLFPCIKRRFLAPRHILKDVVEIANLPDLYKVFERC

SEQ ID NO: 211 - protein, 769 aa, Artificial sequence
  human-yeast hybrid MLH1 protein
MSLRIKALDASVVNKIAAGEIIISPVNALKEMMENSIDANATMIDILVKEGGIKVLQKTDNGSGINKADLPILCERFTTSKLQSFEDLASISTYGFRGEALASISHVAHVTITTKTADGKCAYRASYSDGKMLESPKPVAGKDGTTILVEDLFFNIPSRLRALRSHNDEYSKILDVVGRYAIHSKDIGFSCKKFGDSNYSLSVKPSYTVQDRIRTVFNKSVASNLITFHISKVEDLNLESVDGKVCNLNFISKKSISLIFFINNRLVTCDLLRRALNSVYSNYLPKGFRPFIYLGIVIDPAAVDVNVHPTKREVRFLSQDEIIEKIANQLHAELSAIDTSRTFKASSISTNKPESLIPFNDTIESDRNRKSLRQAQVVENSYTTANSQLRKAKRQENKLVRIDASQAKITSFLSSSQQFNFEGSSTKRQLSEPKVTNVSHSQEAEKLTLNESEQPRDANTINDNDLKDQPKKKQKLGDYKVPSIADDEKNALPISKDGYIRVPKERVNVNLTSIKKLREKVDDSIHRELTDIFANLNYVGVVDEERRLAAIQHDLKLFLIDYGSVCYELFYQIGLTDFANFGKINLQSTNVSDDIVLYNLLSEFDELNDDASKEKIISKIWDMSSMLNEYYSIELVNDGLDNDLKSVKLKSLPLLLKGYIPSLVKLPFFIYRLGKEVDWEDEQECLDGILREIALLYIPDMVPKVDTLDASLSEDEKAQFINRKEHISSLLEHVLFPCIKRRFLAPRHILKDVVEIANLPDLYKVFERC

SEQ ID NO: 212 - protein, 769 aa, Artificial sequence
  human-yeast hybrid MLH1 protein
MSLRIKALDASVVNKIAAGEIIISPVNALKEMMENSIDANATMIDILVKEGGIKVLQITDNRSGINKADLPILCERFTTSKLQSFEDLASISTYGFRGEALASISHVAHVTITTKTADGKCAYRASYSDGKMLESPKPVAGKDGTTILVEDLFFNIPSRLRALRSHNDEYSKILDVVGRYAIHSKDIGFSCKKFGDSNYSLSVKPSYTVQDRIRTVFNKSVASNLITFHISKVEDLNLESVDGKVCNLNFISKKSISLIFFINNRLVTCDLLRRALNSVYSNYLPKGFRPFIYLGIVIDPAAVDVNVHPTKREVRFLSQDEIIEKIANQLHAELSAIDTSRTFKASSISTNKPESLIPFNDTIESDRNRKSLRQAQVVENSYTTANSQLRKAKRQENKLVRIDASQAKITSFLSSSQQFNFEGSSTKRQLSEPKVTNVSHSQEAEKLTLNESEQPRDANTINDNDLKDQPKKKQKLGDYKVPSIADDEKNALPISKDGYIRVPKERVNVNLTSIKKLREKVDDSIHRELTDIFANLNYVGVVDEERRLAAIQHDLKLFLIDYGSVCYELFYQIGLTDFANFGKINLQSTNVSDDIVLYNLLSEFDELNDDASKEKIISKIWDMSSMLNEYYSIELVNDGLDNDLKSVKLKSLPLLLKGYIPSLVKLPFFIYRLGKEVDWEDEQECLDGILREIALLYIPDMVPKVDTLDASLSEDEKAQFINRKEHISSLLEHVLFPCIKRRFLAPRHILKDVVEIANLPDLYKVFERC

SEQ ID NO: 213 - protein, 769 aa, Artificial sequence
  human-yeast hybrid MLH1 protein
MSLRIKALDASVVNKIAAGEIIISPVNALKEMMENSIDAKSTSIQVIVKEGGLKLIQIQDNGTVIRKEDLDIVCERFTTSKLQKFEDLSQIQTYGFRGEALASISHVARVTVTTKVKEDRCAWRVSYAEGKMLESPKPVAGKDGTTILVEDLFFNIPSRLRALRSHNDEYSKILDVVGRYAIHSKDIGFSCKKFGDSNYSLSVKPSYTVQDRIRTVFNKSVASNLITFHISKVEDLNLESVDGKVCNLNFISKKSISLIFFINNRLVTCDLLRRALNSVYSNYLPKGFRPFIYLGIVIDPAAVDVNVHPTKREVRFLSQDEIIEKIANQLHAELSAIDTSRTFKASSISTNKPESLIPFNDTIESDRNRKSLRQAQVVENSYTTANSQLRKAKRQENKLVRIDASQAKITSFLSSSQQFNFEGSSTKRQLSEPKVTNVSHSQEAEKLTLNESEQPRDANTINDNDLKDQPKKKQKLGDYKVPSIADDEKNALPISKDGYIRVPKERVNVNLTSIKKLREKVDDSIHRELTDIFANLNYVGVVDEERRLAAIQHDLKLFLIDYGSVCYELFYQIGLTDFANFGKINLQSTNVSDDIVLYNLLSEFDELNDDASKEKIISKIWDMSSMLNEYYSIELVNDGLDNDLKSVKLKSLPLLLKGYIPSLVKLPFFIYRLGKEVDWEDEQECLDGILREIALLYIPDMVPKVDTLDASLSEDEKAQFINRKEHISSLLEHVLFPCIKRRFLAPRHILKDVVEIANLPDLYKVFERC

SEQ ID NO: 214 - protein, 769 aa, Artificial sequence
  human-yeast hybrid MLH1 protein
MSLRIKALDASVVNKIAAGEIIISPVNALKEMMENSIDAKSTSIQVIVKEGGLKLIQIQDNGTEIRKEDLDIVCERFTTSKLQKFEDLSQIQTYGFRGEALASISHVARVTVTTKVKEDRCAWRVSYAEGKMLESPKPVAGKDGTTILVEDLFFNIPSRLRALRSHNDEYSKILDVVGRYAIHSKDIGFSCKKFGDSNYSLSVKPSYTVQDRIRTVFNKSVASNLITFHISKVEDLNLESVDGKVCNLNFISKKSISLIFFINNRLVTCDLLRRALNSVYSNYLPKGFRPFIYLGIVIDPAAVDVNVHPTKREVRFLSQDEIIEKIANQLHAELSAIDTSRTFKASSISTNKPESLIPFNDTIESDRNRKSLRQAQVVENSYTTANSQLRKAKRQENKLVRIDASQAKITSFLSSSQQFNFEGSSTKRQLSEPKVTNVSHSQEAEKLTLNESEQPRDANTINDNDLKDQPKKKQKLGDYKVPSIADDEKNALPISKDGYIRVPKERVNVNLTSIKKLREKVDDSIHRELTDIFANLNYVGVVDEERRLAAIQHDLKLFLIDYGSVCYELFYQIGLTDFANFGKINLQSTNVSDDIVLYNLLSEFDELNDDASKEKIISKIWDMSSMLNEYYSIELVNDGLDNDLKSVKLKSLPLLLKGYIPSLVKLPFFIYRLGKEVDWEDEQECLDGILREIALLYIPDMVPKVDTLDASLSEDEKAQFINRKEHISSLLEHVLFPCIKRRFLAPRHILKDVVEIANLPDLYKVFERC

SEQ ID NO: 215 - protein, 769 aa, Artificial sequence
  human-yeast hybrid MLH1 protein
MSLRIKALDASVVNKIAAGEIIISPVNALKEMMENSIDAKSTSIQVIVKEGGLKLIQIQDNGTGIRKEVLDIVCERFTTSKLQKFEDLSQIQTYGFRGEALASISHVARVTVTTKVKEDRCAWRVSYAEGKMLESPKPVAGKDGTTILVEDLFFNIPSRLRALRSHNDEYSKILDVVGRYAIHSKDIGFSCKKFGDSNYSLSVKPSYTVQDRIRTVFNKSVASNLITFHISKVEDLNLESVDGKVCNLNFISKKSISLIFFINNRLVTCDLLRRALNSVYSNYLPKGFRPFIYLGIVIDPAAVDVNVHPTKREVRFLSQDEIIEKIANQLHAELSAIDTSRTFKASSISTNKPESLIPFNDTIESDRNRKSLRQAQVVENSYTTANSQLRKAKRQENKLVRIDASQAKITSFLSSSQQFNFEGSSTKRQLSEPKVTNVSHSQEAEKLTLNESEQPRDANTINDNDLKDQPKKKQKLGDYKVPSIADDEKNALPISKDGYIRVPKERVNVNLTSIKKLREKVDDSIHRELTDIFANLNYVGVVDEERRLAAIQHDLKLFLIDYGSVCYELFYQIGLTDFANFGKINLQSTNVSDDIVLYNLLSEFDELNDDASKEKIISKIWDMSSMLNEYYSIELVNDGLDNDLKSVKLKSLPLLLKGYIPSLVKLPFFIYRLGKEVDWEDEQECLDGILREIALLYIPDMVPKVDTLDASLSEDEKAQFINRKEHISSLLEHVLFPCIKRRFLAPRHILKDVVEIANLPDLYKVFERC

SEQ ID NO: 216 - protein, 769 aa, Artificial sequence
  human-yeast hybrid MLH1 protein
MSLRIKALDASVVNKIAAGEIIISPVNALKEMMENSIDAKSTSIQVIVKEGGLKLIQIQDNGTGIRKEDQDIVCERFTTSKLQKFEDLSQIQTYGFRGEALASISHVARVTVTTKVKEDRCAWRVSYAEGKMLESPKPVAGKDGTTILVEDLFFNIPSRLRALRSHNDEYSKILDVVGRYAIHSKDIGFSCKKFGDSNYSLSVKPSYTVQDRIRTVFNKSVASNLITFHISKVEDLNLESVDGKVCNLNFISKKSISLIFFINNRLVTCDLLRRALNSVYSNYLPKGFRPFIYLGIVIDPAAVDVNVHPTKREVRFLSQDEIIEKIANQLHAELSAIDTSRTFKASSISTNKPESLIPFNDTIESDRNRKSLRQAQVVENSYTTANSQLRKAKRQENKLVRIDASQAKITSFLSSSQQFNFEGSSTKRQLSEPKVTNVSHSQEAEKLTLNESEQPRDANTINDNDLKDQPKKKQKLGDYKVPSIADDEKNALPISKDGYIRVPKERVNVNLTSIKKLREKVDDSIHRELTDIFANLNYVGVVDEERRLAAIQHDLKLFLIDYGSVCYELFYQIGLTDFANFGKINLQSTNVSDDIVLYNLLSEFDELNDDASKEKIISKIWDMSSMLNEYYSIELVNDGLDNDLKSVKLKSLPLLLKGYIPSLVKLPFFIYRLGKEVDWEDEQECLDGILREIALLYIPDMVPKVDTLDASLSEDEKAQFINRKEHISSLLEHVLFPCIKRRFLAPRHILKDVVEIANLPDLYKVFERC

SEQ ID NO: 217 - protein, 769 aa, Artificial sequence
  human-yeast hybrid MLH1 protein
MSLRIKALDASVVNKIAAGEIIISPVNALKEMMENSIDANATMIDILVKEGGIKVLQITDNGSGINKADLPILRERFTTSKLQSFEDLASISTYGFRGEALASISHVAHVTITTKTADGKCAYRASYSDGKMLESPKPVAGKDGTTILVEDLFFNIPSRLRALRSHNDEYSKILDVVGRYAIHSKDIGFSCKKFGDSNYSLSVKPSYTVQDRIRTVFNKSVASNLITFHISKVEDLNLESVDGKVCNLNFISKKSISLIFFINNRLVTCDLLRRALNSVYSNYLPKGFRPFIYLGIVIDPAAVDVNVHPTKREVRFLSQDEIIEKIANQLHAELSAIDTSRTFKASSISTNKPESLIPFNDTIESDRNRKSLRQAQVVENSYTTANSQLRKAKRQENKLVRIDASQAKITSFLSSSQQFNFEGSSTKRQLSEPKVTNVSHSQEAEKLTLNESEQPRDANTINDNDLKDQPKKKQKLGDYKVPSIADDEKNALPISKDGYIRVPKERVNVNLTSIKKLREKVDDSIHRELTDIFANLNYVGVVDEERRLAAIQHDLKLFLIDYGSVCYELFYQIGLTDFANFGKINLQSTNVSDDIVLYNLLSEFDELNDDASKEKIISKIWDMSSMLNEYYSIELVNDGLDNDLKSVKLKSLPLLLKGYIPSLVKLPFFIYRLGKEVDWEDEQECLDGILREIALLYIPDMVPKVDTLDASLSEDEKAQFINRKEHISSLLEHVLFPCIKRRFLAPRHILKDVVEIANLPDLYKVFERC

SEQ ID NO: 218 - protein, 769 aa, Artificial sequence
  human-yeast hybrid MLH1 protein
MSLRIKALDASVVNKIAAGEIIISPVNALKEMMENSIDAKSTSIQVIVKEGGLKLIQIQDNGTGIRKEDLDIVGERFTTSKLQKFEDLSQIQTYGFRGEALASISHVARVTVTTKVKEDRCAWRVSYAEGKMLESPKPVAGKDGTTILVEDLFFNIPSRLRALRSHNDEYSKILDVVGRYAIHSKDIGFSCKKFGDSNYSLSVKPSYTVQDRIRTVFNKSVASNLITFHISKVEDLNLESVDGKVCNLNFISKKSISLIFFINNRLVTCDLLRRALNSVYSNYLPKGFRPFIYLGIVIDPAAVDVNVHPTKREVRFLSQDEIIEKIANQLHAELSAIDTSRTFKASSISTNKPESLIPFNDTIESDRNRKSLRQAQVVENSYTTANSQLRKAKRQENKLVRIDASQAKITSFLSSSQQFNFEGSSTKRQLSEPKVTNVSHSQEAEKLTLNESEQPRDANTINDNDLKDQPKKKQKLGDYKVPSIADDEKNALPISKDGYIRVPKERVNVNLTSIKKLREKVDDSIHRELTDIFANLNYVGVVDEERRLAAIQHDLKLFLIDYGSVCYELFYQIGLTDFANFGKINLQSTNVSDDIVLYNLLSEFDELNDDASKEKIISKIWDMSSMLNEYYSIELVNDGLDNDLKSVKLKSLPLLLKGYIPSLVKLPFFIYRLGKEVDWEDEQECLDGILREIALLYIPDMVPKVDTLDASLSEDEKAQFINRKEHISSLLEHVLFPCIKRRFLAPRHILKDVVEIANLPDLYKVFERC

SEQ ID NO: 219 - protein, 769 aa, Artificial sequence
  human-yeast hybrid MLH1 protein
MSLRIKALDASVVNKIAAGEIIISPVNALKEMMENSIDANATMIDILVKEGGIKVLQITDNGSGINKADLPILCVRFTTSKLQSFEDLASISTYGFRGEALASISHVAHVTITTKTADGKCAYRASYSDGKMLESPKPVAGKDGTTILVEDLFFNIPSRLRALRSHNDEYSKILDVVGRYAIHSKDIGFSCKKFGDSNYSLSVKPSYTVQDRIRTVFNKSVASNLITFHISKVEDLNLESVDGKVCNLNFISKKSISLIFFINNRLVTCDLLRRALNSVYSNYLPKGFRPFIYLGIVIDPAAVDVNVHPTKREVRFLSQDEIIEKIANQLHAELSAIDTSRTFKASSISTNKPESLIPFNDTIESDRNRKSLRQAQVVENSYTTANSQLRKAKRQENKLVRIDASQAKITSFLSSSQQFNFEGSSTKRQLSEPKVTNVSHSQEAEKLTLNESEQPRDANTINDNDLKDQPKKKQKLGDYKVPSIADDEKNALPISKDGYIRVPKERVNVNLTSIKKLREKVDDSIHRELTDIFANLNYVGVVDEERRLAAIQHDLKLFLIDYGSVCYELFYQIGLTDFANFGKINLQSTNVSDDIVLYNLLSEFDELNDDASKEKIISKIWDMSSMLNEYYSIELVNDGLDNDLKSVKLKSLPLLLKGYIPSLVKLPFFIYRLGKEVDWEDEQECLDGILREIALLYIPDMVPKVDTLDASLSEDEKAQFINRKEHISSLLEHVLFPCIKRRFLAPRHILKDVVEIANLPDLYKVFERC

SEQ ID NO: 220 - protein, 769 aa, Artificial sequence
  human-yeast hybrid MLH1 protein
MSLRIKALDASVVNKIAAGEIIISPVNALKEMMENSIDANATMIDILVKEGGIKVLQITDNGSGINKADLPILCERLTTSKLQSFEDLASISTYGFRGEALASISHVAHVTITTKTADGKCAYRASYSDGKMLESPKPVAGKDGTTILVEDLFFNIPSRLRALRSHNDEYSKILDVVGRYAIHSKDIGFSCKKFGDSNYSLSVKPSYTVQDRIRTVFNKSVASNLITFHISKVEDLNLESVDGKVCNLNFISKKSISLIFFINNRLVTCDLLRRALNSVYSNYLPKGFRPFIYLGIVIDPAAVDVNVHPTKREVRFLSQDEIIEKIANQLHAELSAIDTSRTFKASSISTNKPESLIPFNDTIESDRNRKSLRQAQVVENSYTTANSQLRKAKRQENKLVRIDASQAKITSFLSSSQQFNFEGSSTKRQLSEPKVTNVSHSQEAEKLTLNESEQPRDANTINDNDLKDQPKKKQKLGDYKVPSIADDEKNALPISKDGYIRVPKERVNVNLTSIKKLREKVDDSIHRELTDIFANLNYVGVVDEERRLAAIQHDLKLFLIDYGSVCYELFYQIGLTDFANFGKINLQSTNVSDDIVLYNLLSEFDELNDDASKEKIISKIWDMSSMLNEYYSIELVNDGLDNDLKSVKLKSLPLLLKGYIPSLVKLPFFIYRLGKEVDWEDEQECLDGILREIALLYIPDMVPKVDTLDASLSEDEKAQFINRKEHISSLLEHVLFPCIKRRFLAPRHILKDVVEIANLPDLYKVFERC

SEQ ID NO: 221 - protein, 769 aa, Artificial sequence
  human-yeast hybrid MLH1 protein
MSLRIKALDASVVNKIAAGEIIISPVNALKEMMENSIDANATMIDILVKEGGIKVLQITDNGSGINKADLPILCERFMTSKLQSFEDLASISTYGFRGEALASISHVAHVTITTKTADGKCAYRASYSDGKMLESPKPVAGKDGTTILVEDLFFNIPSRLRALRSHNDEYSKILDVVGRYAIHSKDIGFSCKKFGDSNYSLSVKPSYTVQDRIRTVFNKSVASNLITFHISKVEDLNLESVDGKVCNLNFISKKSISLIFFINNRLVTCDLLRRALNSVYSNYLPKGFRPFIYLGIVIDPAAVDVNVHPTKREVRFLSQDEIIEKIANQLHAELSAIDTSRTFKASSISTNKPESLIPFNDTIESDRNRKSLRQAQVVENSYTTANSQLRKAKRQENKLVRIDASQAKITSFLSSSQQFNFEGSSTKRQLSEPKVTNVSHSQEAEKLTLNESEQPRDANTINDNDLKDQPKKKQKLGDYKVPSIADDEKNALPISKDGYIRVPKERVNVNLTSIKKLREKVDDSIHRELTDIFANLNYVGVVDEERRLAAIQHDLKLFLIDYGSVCYELFYQIGLTDFANFGKINLQSTNVSDDIVLYNLLSEFDELNDDASKEKIISKIWDMSSMLNEYYSIELVNDGLDNDLKSVKLKSLPLLLKGYIPSLVKLPFFIYRLGKEVDWEDEQECLDGILREIALLYIPDMVPKVDTLDASLSEDEKAQFINRKEHISSLLEHVLFPCIKRRFLAPRHILKDVVEIANLPDLYKVFERC

SEQ ID NO: 222 - protein, 769 aa, Artificial sequence
  human-yeast hybrid MLH1 protein
MSLRIKALDASVVNKIAAGEIIISPVNALKEMMENSIDANATMIDILVKEGGIKVLQITDNGSGINKADLPILCERFTTSRLQSFEDLASISTYGFRGEALASISHVAHVTITTKTADGKCAYRASYSDGKMLESPKPVAGKDGTTILVEDLFFNIPSRLRALRSHNDEYSKILDVVGRYAIHSKDIGFSCKKFGDSNYSLSVKPSYTVQDRIRTVFNKSVASNLITFHISKVEDLNLESVDGKVCNLNFISKKSISLIFFINNRLVTCDLLRRALNSVYSNYLPKGFRPFIYLGIVIDPAAVDVNVHPTKREVRFLSQDEIIEKIANQLHAELSAIDTSRTFKASSISTNKPESLIPFNDTIESDRNRKSLRQAQVVENSYTTANSQLRKAKRQENKLVRIDASQAKITSFLSSSQQFNFEGSSTKRQLSEPKVTNVSHSQEAEKLTLNESEQPRDANTINDNDLKDQPKKKQKLGDYKVPSIADDEKNALPISKDGYIRVPKERVNVNLTSIKKLREKVDDSIHRELTDIFANLNYVGVVDEERRLAAIQHDLKLFLIDYGSVCYELFYQIGLTDFANFGKINLQSTNVSDDIVLYNLLSEFDELNDDASKEKIISKIWDMSSMLNEYYSIELVNDGLDNDLKSVKLKSLPLLLKGYIPSLVKLPFFIYRLGKEVDWEDEQECLDGILREIALLYIPDMVPKVDTLDASLSEDEKAQFINRKEHISSLLEHVLFPCIKRRFLAPRHILKDVVEIANLPDLYKVFERC

SEQ ID NO: 223 - protein, 769 aa, Artificial sequence
  human-yeast hybrid MLH1 protein
MSLRIKALDASVVNKIAAGEIIISPVNALKEMMENSIDANATMIDILVKEGGIKVLQITDNGSGINKADLPILCERFTTSELQSFEDLASISTYGFRGEALASISHVAHVTITTKTADGKCAYRASYSDGKMLESPKPVAGKDGTTILVEDLFFNIPSRLRALRSHNDEYSKILDVVGRYAIHSKDIGFSCKKFGDSNYSLSVKPSYTVQDRIRTVFNKSVASNLITFHISKVEDLNLESVDGKVCNLNFISKKSISLIFFINNRLVTCDLLRRALNSVYSNYLPKGFRPFIYLGIVIDPAAVDVNVHPTKREVRFLSQDEIIEKIANQLHAELSAIDTSRTFKASSISTNKPESLIPFNDTIESDRNRKSLRQAQVVENSYTTANSQLRKAKRQENKLVRIDASQAKITSFLSSSQQFNFEGSSTKRQLSEPKVTNVSHSQEAEKLTLNESEQPRDANTINDNDLKDQPKKKQKLGDYKVPSIADDEKNALPISKDGYIRVPKERVNVNLTSIKKLREKVDDSIHRELTDIFANLNYVGVVDEERRLAAIQHDLKLFLIDYGSVCYELFYQIGLTDFANFGKINLQSTNVSDDIVLYNLLSEFDELNDDASKEKIISKIWDMSSMLNEYYSIELVNDGLDNDLKSVKLKSLPLLLKGYIPSLVKLPFFIYRLGKEVDWEDEQECLDGILREIALLYIPDMVPKVDTLDASLSEDEKAQFINRKEHISSLLEHVLFPCIKRRFLAPRHILKDVVEIANLPDLYKVFERC

SEQ ID NO: 224 - protein, 769 aa, Artificial sequence
  human-yeast hybrid MLH1 protein
MSLRIKALDASVVNKIAAGEIIISPVNALKEMMENSIDANATMIDILVKEGGIKVLQITDNGSGINKADLPILCERFTTSKSQSFEDLASISTYGFRGEALASISHVAHVTITTKTADGKCAYRASYSDGKMLESPKPVAGKDGTTILVEDLFFNIPSRLRALRSHNDEYSKILDVVGRYAIHSKDIGFSCKKFGDSNYSLSVKPSYTVQDRIRTVFNKSVASNLITFHISKVEDLNLESVDGKVCNLNFISKKSISLIFFINNRLVTCDLLRRALNSVYSNYLPKGFRPFIYLGIVIDPAAVDVNVHPTKREVRFLSQDEIIEKIANQLHAELSAIDTSRTFKASSISTNKPESLIPFNDTIESDRNRKSLRQAQVVENSYTTANSQLRKAKRQENKLVRIDASQAKITSFLSSSQQFNFEGSSTKRQLSEPKVTNVSHSQEAEKLTLNESEQPRDANTINDNDLKDQPKKKQKLGDYKVPSIADDEKNALPISKDGYIRVPKERVNVNLTSIKKLREKVDDSIHRELTDIFANLNYVGVVDEERRLAAIQHDLKLFLIDYGSVCYELFYQIGLTDFANFGKINLQSTNVSDDIVLYNLLSEFDELNDDASKEKIISKIWDMSSMLNEYYSIELVNDGLDNDLKSVKLKSLPLLLKGYIPSLVKLPFFIYRLGKEVDWEDEQECLDGILREIALLYIPDMVPKVDTLDASLSEDEKAQFINRKEHISSLLEHVLFPCIKRRFLAPRHILKDVVEIANLPDLYKVFERC

SEQ ID NO: 225 - protein, 769 aa, Artificial sequence
  human-yeast hybrid MLH1 protein
MSLRIKALDASVVNKIAAGEIIISPVNALKEMMENSIDANATMIDILVKEGGIKVLQITDNGSGINKADLPILCERFTTSKLQSFEDLASISTYGFRGEPLASISHVAHVTITTKTADGKCAYRASYSDGKMLESPKPVAGKDGTTILVEDLFFNIPSRLRALRSHNDEYSKILDVVGRYAIHSKDIGFSCKKFGDSNYSLSVKPSYTVQDRIRTVFNKSVASNLITFHISKVEDLNLESVDGKVCNLNFISKKSISLIFFINNRLVTCDLLRRALNSVYSNYLPKGFRPFIYLGIVIDPAAVDVNVHPTKREVRFLSQDEIIEKIANQLHAELSAIDTSRTFKASSISTNKPESLIPFNDTIESDRNRKSLRQAQVVENSYTTANSQLRKAKRQENKLVRIDASQAKITSFLSSSQQFNFEGSSTKRQLSEPKVTNVSHSQEAEKLTLNESEQPRDANTINDNDLKDQPKKKQKLGDYKVPSIADDEKNALPISKDGYIRVPKERVNVNLTSIKKLREKVDDSIHRELTDIFANLNYVGVVDEERRLAAIQHDLKLFLIDYGSVCYELFYQIGLTDFANFGKINLQSTNVSDDIVLYNLLSEFDELNDDASKEKIISKIWDMSSMLNEYYSIELVNDGLDNDLKSVKLKSLPLLLKGYIPSLVKLPFFIYRLGKEVDWEDEQECLDGILREIALLYIPDMVPKVDTLDASLSEDEKAQFINRKEHISSLLEHVLFPCIKRRFLAPRHILKDVVEIANLPDLYKVFERC

SEQ ID NO: 226 - protein, 769 aa, Artificial sequence
  human-yeast hybrid MLH1 protein
MSLRIKALDASVVNKIAAGEIIISPVNALKEMMENSIDANATMIDILVKEGGIKVLQITDNGSGINKADLPILCERFTTSKLQSFEDLASISTYGFRGEALASISHVAHVTISTKTADGKCAYRASYSDGKMLESPKPVAGKDGTTILVEDLFFNIPSRLRALRSHNDEYSKILDVVGRYAIHSKDIGFSCKKFGDSNYSLSVKPSYTVQDRIRTVFNKSVASNLITFHISKVEDLNLESVDGKVCNLNFISKKSISLIFFINNRLVTCDLLRRALNSVYSNYLPKGFRPFIYLGIVIDPAAVDVNVHPTKREVRFLSQDEIIEKIANQLHAELSAIDTSRTFKASSISTNKPESLIPFNDTIESDRNRKSLRQAQVVENSYTTANSQLRKAKRQENKLVRIDASQAKITSFLSSSQQFNFEGSSTKRQLSEPKVTNVSHSQEAEKLTLNESEQPRDANTINDNDLKDQPKKKQKLGDYKVPSIADDEKNALPISKDGYIRVPKERVNVNLTSIKKLREKVDDSIHRELTDIFANLNYVGVVDEERRLAAIQHDLKLFLIDYGSVCYELFYQIGLTDFANFGKINLQSTNVSDDIVLYNLLSEFDELNDDASKEKIISKIWDMSSMLNEYYSIELVNDGLDNDLKSVKLKSLPLLLKGYIPSLVKLPFFIYRLGKEVDWEDEQECLDGILREIALLYIPDMVPKVDTLDASLSEDEKAQFINRKEHISSLLEHVLFPCIKRRFLAPRHILKDVVEIANLPDLYKVFERC

SEQ ID NO: 227 - protein, 769 aa, Artificial sequence
  human-yeast hybrid MLH1 protein
MSLRIKALDASVVNKIAAGEIIISPVNALKEMMENSIDANATMIDILVKEGGIKVLQITDNGSGINKADLPILCERFTTSKLQSFEDLASISTYGFRGEALASISHVAHVTITTITADGKCAYRASYSDGKMLESPKPVAGKDGTTILVEDLFFNIPSRLRALRSHNDEYSKILDVVGRYAIHSKDIGFSCKKFGDSNYSLSVKPSYTVQDRIRTVFNKSVASNLITFHISKVEDLNLESVDGKVCNLNFISKKSISLIFFINNRLVTCDLLRRALNSVYSNYLPKGFRPFIYLGIVIDPAAVDVNVHPTKREVRFLSQDEIIEKIANQLHAELSAIDTSRTFKASSISTNKPESLIPFNDTIESDRNRKSLRQAQVVENSYTTANSQLRKAKRQENKLVRIDASQAKITSFLSSSQQFNFEGSSTKRQLSEPKVTNVSHSQEAEKLTLNESEQPRDANTINDNDLKDQPKKKQKLGDYKVPSIADDEKNALPISKDGYIRVPKERVNVNLTSIKKLREKVDDSIHRELTDIFANLNYVGVVDEERRLAAIQHDLKLFLIDYGSVCYELFYQIGLTDFANFGKINLQSTNVSDDIVLYNLLSEFDELNDDASKEKIISKIWDMSSMLNEYYSIELVNDGLDNDLKSVKLKSLPLLLKGYIPSLVKLPFFIYRLGKEVDWEDEQECLDGILREIALLYIPDMVPKVDTLDASLSEDEKAQFINRKEHISSLLEHVLFPCIKRRFLAPRHILKDVVEIANLPDLYKVFERC

SEQ ID NO: 228 - protein, 769 aa, Artificial sequence
  human-yeast hybrid MLH1 protein
MSLRIKALDASVVNKIAAGEIIISPVNALKEMMENSIDANATMIDILVKEGGIKVLQITDNGSGINKADLPILCERFTTSKLQSFEDLASISTYGFRGEALASISHVAHVTITTKTADGKCAYRASYSDEKMLESPKPVAGKDGTTILVEDLFFNIPSRLRALRSHNDEYSKILDVVGRYAIHSKDIGFSCKKFGDSNYSLSVKPSYTVQDRIRTVFNKSVASNLITFHISKVEDLNLESVDGKVCNLNFISKKSISLIFFINNRLVTCDLLRRALNSVYSNYLPKGFRPFIYLGIVIDPAAVDVNVHPTKREVRFLSQDEIIEKIANQLHAELSAIDTSRTFKASSISTNKPESLIPFNDTIESDRNRKSLRQAQVVENSYTTANSQLRKAKRQENKLVRIDASQAKITSFLSSSQQFNFEGSSTKRQLSEPKVTNVSHSQEAEKLTLNESEQPRDANTINDNDLKDQPKKKQKLGDYKVPSIADDEKNALPISKDGYIRVPKERVNVNLTSIKKLREKVDDSIHRELTDIFANLNYVGVVDEERRLAAIQHDLKLFLIDYGSVCYELFYQIGLTDFANFGKINLQSTNVSDDIVLYNLLSEFDELNDDASKEKIISKIWDMSSMLNEYYSIELVNDGLDNDLKSVKLKSLPLLLKGYIPSLVKLPFFIYRLGKEVDWEDEQECLDGILREIALLYIPDMVPKVDTLDASLSEDEKAQFINRKEHISSLLEHVLFPCIKRRFLAPRHILKDVVEIANLPDLYKVFERC

SEQ ID NO: 229 - protein, 769 aa, Artificial sequence
  human-yeast hybrid MLH1 protein
MSLRIKALDASVVNKIAAGEIIISPVNALKEMMENSIDANATMIDILVKEGGIKVLQITDNGSGINKADLPILCERFTTSKLQSFEDLASISTYGFRGEALASISHVAHVTITTKTADGKCAYRASYSDGKMLESHKPVAGKDGTTILVEDLFFNIPSRLRALRSHNDEYSKILDVVGRYAIHSKDIGFSCKKFGDSNYSLSVKPSYTVQDRIRTVFNKSVASNLITFHISKVEDLNLESVDGKVCNLNFISKKSISLIFFINNRLVTCDLLRRALNSVYSNYLPKGFRPFIYLGIVIDPAAVDVNVHPTKREVRFLSQDEIIEKIANQLHAELSAIDTSRTFKASSISTNKPESLIPFNDTIESDRNRKSLRQAQVVENSYTTANSQLRKAKRQENKLVRIDASQAKITSFLSSSQQFNFEGSSTKRQLSEPKVTNVSHSQEAEKLTLNESEQPRDANTINDNDLKDQPKKKQKLGDYKVPSIADDEKNALPISKDGYIRVPKERVNVNLTSIKKLREKVDDSIHRELTDIFANLNYVGVVDEERRLAAIQHDLKLFLIDYGSVCYELFYQIGLTDFANFGKINLQSTNVSDDIVLYNLLSEFDELNDDASKEKIISKIWDMSSMLNEYYSIELVNDGLDNDLKSVKLKSLPLLLKGYIPSLVKLPFFIYRLGKEVDWEDEQECLDGILREIALLYIPDMVPKVDTLDASLSEDEKAQFINRKEHISSLLEHVLFPCIKRRFLAPRHILKDVVEIANLPDLYKVFERC

SEQ ID NO: 230 - protein, 769 aa, Artificial sequence
  human-yeast hybrid MLH1 protein
MSLRIKALDASVVNKIAAGEIIISPVNALKEMMENSIDANATMIDILVKEGGIKVLQITDNGSGINKADLPILCERFTTSKLQSFEDLASISTYGFRGEALASISHVAHVTITTKTADGKCAYRASYSDGKMLESPKPVVGKDGTTILVEDLFFNIPSRLRALRSHNDEYSKILDVVGRYAIHSKDIGFSCKKFGDSNYSLSVKPSYTVQDRIRTVFNKSVASNLITFHISKVEDLNLESVDGKVCNLNFISKKSISLIFFINNRLVTCDLLRRALNSVYSNYLPKGFRPFIYLGIVIDPAAVDVNVHPTKREVRFLSQDEIIEKIANQLHAELSAIDTSRTFKASSISTNKPESLIPFNDTIESDRNRKSLRQAQVVENSYTTANSQLRKAKRQENKLVRIDASQAKITSFLSSSQQFNFEGSSTKRQLSEPKVTNVSHSQEAEKLTLNESEQPRDANTINDNDLKDQPKKKQKLGDYKVPSIADDEKNALPISKDGYIRVPKERVNVNLTSIKKLREKVDDSIHRELTDIFANLNYVGVVDEERRLAAIQHDLKLFLIDYGSVCYELFYQIGLTDFANFGKINLQSTNVSDDIVLYNLLSEFDELNDDASKEKIISKIWDMSSMLNEYYSIELVNDGLDNDLKSVKLKSLPLLLKGYIPSLVKLPFFIYRLGKEVDWEDEQECLDGILREIALLYIPDMVPKVDTLDASLSEDEKAQFINRKEHISSLLEHVLFPCIKRRFLAPRHILKDVVEIANLPDLYKVFERC

SEQ ID NO: 231 - protein, 769 aa, Artificial sequence
  human-yeast hybrid MLH1 protein
MSLRIKALDASVVNKIAAGEIIISPVNALKEMMENSIDANATMIDILVKEGGIKVLQITDNGSGINKADLPILCERFTTSKLQSFEDLASISTYGFRGEALASISHVAHVTITTKTADGKCAYRASYSDGKMLESPKPVAGKDSTTILVEDLFFNIPSRLRALRSHNDEYSKILDVVGRYAIHSKDIGFSCKKFGDSNYSLSVKPSYTVQDRIRTVFNKSVASNLITFHISKVEDLNLESVDGKVCNLNFISKKSISLIFFINNRLVTCDLLRRALNSVYSNYLPKGFRPFIYLGIVIDPAAVDVNVHPTKREVRFLSQDEIIEKIANQLHAELSAIDTSRTFKASSISTNKPESLIPFNDTIESDRNRKSLRQAQVVENSYTTANSQLRKAKRQENKLVRIDASQAKITSFLSSSQQFNFEGSSTKRQLSEPKVTNVSHSQEAEKLTLNESEQPRDANTINDNDLKDQPKKKQKLGDYKVPSIADDEKNALPISKDGYIRVPKERVNVNLTSIKKLREKVDDSIHRELTDIFANLNYVGVVDEERRLAAIQHDLKLFLIDYGSVCYELFYQIGLTDFANFGKINLQSTNVSDDIVLYNLLSEFDELNDDASKEKIISKIWDMSSMLNEYYSIELVNDGLDNDLKSVKLKSLPLLLKGYIPSLVKLPFFIYRLGKEVDWEDEQECLDGILREIALLYIPDMVPKVDTLDASLSEDEKAQFINRKEHISSLLEHVLFPCIKRRFLAPRHILKDVVEIANLPDLYKVFERC

SEQ ID NO: 232 - protein, 756 aa, Homo sapiens
MSFVAGVIRRLDETVVNRIAAGEVIQRPANAIKEMIENCLDAKATSIQVIVKEGGLKLIQIQDNGTGIRKEDLDIVCERFTTSKLQSFEDLASISTYGFRGEALASISHVAHVTITTKTADGKCAYRASYSDGKLKAPPKPCAGNQGTQITVEDLFYNIATRRKALKNPSEEYGKILEVVGRYSVHNAGISFSVKKQGETVADVRTLPNASTVDNIRSVFGNAVSRELIEIGCEDKTLAFKMNGYISNANYSVKKCIFLLFINHRLVESTSLRKAIETVYAAYLPKNTHPFLYLSLEISPQNVDVNVHPTKHEVHFLHEESILERVQQHIESKLLGSNSSRMYFTQTLLPGLAGPSGEMVKSTTSLTSSSTSGSSDKVYAHQMVRTDSREQKLDAFLQPLSKPLSSQPQAIVTEDKTDISSGRARQQDEEMLELPAPAEVAAKNQSLEGDTTKGTSEMSEKRGPTSSNPRKRHREDSDVEMVEDDSRKEMTAACTPRRRIINLTSVLSLQEEINEQGHEVLREMLHNHSFVGCVNPQWALAQHQTKLYLLNTTKLSEELFYQILIYDFANFGVLRLSEPAPLFDLAMLALDSPESGWTEEDGPKEGLAEYIVEFLKKKAEMLADYFSLEIDEEGNLIGLPLLIDNYVPPLEGLPIFILRLATEVNWDEEKECFESLSKECAMFYSIRKQYISEESTLSGQQSEVPGSIPNSWKWTVEHIVYKALRSHILPPKHFTEDGNILQLANLPDLYKVFERC

SEQ ID NO: 233 - protein, 756 aa, Homo sapiens
MSFVAGVIRRLDETVVNRIAAGEVIQRPANAIKEMIENCLDAKRTSIQVIVKEGGLKLIQIQDNGTGIRKEDLDIVCERFTTSKLQSFEDLASISTYGFRGEALASISHVAHVTITTKTADGKCAYRASYSDGKLKAPPKPCAGNQGTQITVEDLFYNIATRRKALKNPSEEYGKILEVVGRYSVHNAGISFSVKKQGETVADVRTLPNASTVDNIRSVFGNAVSRELIEIGCEDKTLAFKMNGYISNANYSVKKCIFLLFINHRLVESTSLRKAIETVYAAYLPKNTHPFLYLSLEISPQNVDVNVHPTKHEVHFLHEESILERVQQHIESKLLGSNSSRMYFTQTLLPGLAGPSGEMVKSTTSLTSSSTSGSSDKVYAHQMVRTDSREQKLDAFLQPLSKPLSSQPQAIVTEDKTDISSGRARQQDEEMLELPAPAEVAAKNQSLEGDTTKGTSEMSEKRGPTSSNPRKRHREDSDVEMVEDDSRKEMTAACTPRRRIINLTSVLSLQEEINEQGHEVLREMLHNHSFVGCVNPQWALAQHQTKLYLLNTTKLSEELFYQILIYDFANFGVLRLSEPAPLFDLAMLALDSPESGWTEEDGPKEGLAEYIVEFLKKKAEMLADYFSLEIDEEGNLIGLPLLIDNYVPPLEGLPIFILRLATEVNWDEEKECFESLSKECAMFYSIRKQYISEESTLSGQQSEVPGSIPNSWKWTVEHIVYKALRSHILPPKHFTEDGNILQLANLPDLYKVFERC

SEQ ID NO: 234 - protein, 756 aa, Homo sapiens
MSFVAGVIRRLDETVVNRIAAGEVIQRPANAIKEMIENCLDAKCTSIQVIVKEGGLKLIQIQDNGTGIRKEDLDIVCERFTTSKLQSFEDLASISTYGFRGEALASISHVAHVTITTKTADGKCAYRASYSDGKLKAPPKPCAGNQGTQITVEDLFYNIATRRKALKNPSEEYGKILEVVGRYSVHNAGISFSVKKQGETVADVRTLPNASTVDNIRSVFGNAVSRELIEIGCEDKTLAFKMNGYISNANYSVKKCIFLLFINHRLVESTSLRKAIETVYAAYLPKNTHPFLYLSLEISPQNVDVNVHPTKHEVHFLHEESILERVQQHIESKLLGSNSSRMYFTQTLLPGLAGPSGEMVKSTTSLTSSSTSGSSDKVYAHQMVRTDSREQKLDAFLQPLSKPLSSQPQAIVTEDKTDISSGRARQQDEEMLELPAPAEVAAKNQSLEGDTTKGTSEMSEKRGPTSSNPRKRHREDSDVEMVEDDSRKEMTAACTPRRRIINLTSVLSLQEEINEQGHEVLREMLHNHSFVGCVNPQWALAQHQTKLYLLNTTKLSEELFYQILIYDFANFGVLRLSEPAPLFDLAMLALDSPESGWTEEDGPKEGLAEYIVEFLKKKAEMLADYFSLEIDEEGNLIGLPLLIDNYVPPLEGLPIFILRLATEVNWDEEKECFESLSKECAMFYSIRKQYISEESTLSGQQSEVPGSIPNSWKWTVEHIVYKALRSHILPPKHFTEDGNILQLANLPDLYKVFERC

SEQ ID NO: 235 - protein, 756 aa, Homo sapiens
MSFVAGVIRRLDETVVNRIAAGEVIQRPANAIKEMIENCLDAKQTSIQVIVKEGGLKLIQIQDNGTGIRKEDLDIVCERFTTSKLQSFEDLASISTYGFRGEALASISHVAHVTITTKTADGKCAYRASYSDGKLKAPPKPCAGNQGTQITVEDLFYNIATRRKALKNPSEEYGKILEVVGRYSVHNAGISFSVKKQGETVADVRTLPNASTVDNIRSVFGNAVSRELIEIGCEDKTLAFKMNGYISNANYSVKKCIFLLFINHRLVESTSLRKAIETVYAAYLPKNTHPFLYLSLEISPQNVDVNVHPTKHEVHFLHEESILERVQQHIESKLLGSNSSRMYFTQTLLPGLAGPSGEMVKSTTSLTSSSTSGSSDKVYAHQMVRTDSREQKLDAFLQPLSKPLSSQPQAIVTEDKTDISSGRARQQDEEMLELPAPAEVAAKNQSLEGDTTKGTSEMSEKRGPTSSNPRKRHREDSDVEMVEDDSRKEMTAACTPRRRIINLTSVLSLQEEINEQGHEVLREMLHNHSFVGCVNPQWALAQHQTKLYLLNTTKLSEELFYQILIYDFANFGVLRLSEPAPLFDLAMLALDSPESGWTEEDGPKEGLAEYIVEFLKKKAEMLADYFSLEIDEEGNLIGLPLLIDNYVPPLEGLPIFILRLATEVNWDEEKECFESLSKECAMFYSIRKQYISEESTLSGQQSEVPGSIPNSWKWTVEHIVYKALRSHILPPKHFTEDGNILQLANLPDLYKVFERC

SEQ ID NO: 236 - protein, 756 aa, Homo sapiens
MSFVAGVIRRLDETVVNRIAAGEVIQRPANAIKEMIENCLDAKHTSIQVIVKEGGLKLIQIQDNGTGIRKEDLDIVCERFTTSKLQSFEDLASISTYGFRGEALASISHVAHVTITTKTADGKCAYRASYSDGKLKAPPKPCAGNQGTQITVEDLFYNIATRRKALKNPSEEYGKILEVVGRYSVHNAGISFSVKKQGETVADVRTLPNASTVDNIRSVFGNAVSRELIEIGCEDKTLAFKMNGYISNANYSVKKCIFLLFINHRLVESTSLRKAIETVYAAYLPKNTHPFLYLSLEISPQNVDVNVHPTKHEVHFLHEESILERVQQHIESKLLGSNSSRMYFTQTLLPGLAGPSGEMVKSTTSLTSSSTSGSSDKVYAHQMVRTDSREQKLDAFLQPLSKPLSSQPQAIVTEDKTDISSGRARQQDEEMLELPAPAEVAAKNQSLEGDTTKGTSEMSEKRGPTSSNPRKRHREDSDVEMVEDDSRKEMTAACTPRRRIINLTSVLSLQEEINEQGHEVLREMLHNHSFVGCVNPQWALAQHQTKLYLLNTTKLSEELFYQILIYDFANFGVLRLSEPAPLFDLAMLALDSPESGWTEEDGPKEGLAEYIVEFLKKKAEMLADYFSLEIDEEGNLIGLPLLIDNYVPPLEGLPIFILRLATEVNWDEEKECFESLSKECAMFYSIRKQYISEESTLSGQQSEVPGSIPNSWKWTVEHIVYKALRSHILPPKHFTEDGNILQLANLPDLYKVFERC

SEQ ID NO: 237 - protein, 756 aa, Homo sapiens
MSFVAGVIRRLDETVVNRIAAGEVIQRPANAIKEMIENCLDAKITSIQVIVKEGGLKLIQIQDNGTGIRKEDLDIVCERFTTSKLQSFEDLASISTYGFRGEALASISHVAHVTITTKTADGKCAYRASYSDGKLKAPPKPCAGNQGTQITVEDLFYNIATRRKALKNPSEEYGKILEVVGRYSVHNAGISFSVKKQGETVADVRTLPNASTVDNIRSVFGNAVSRELIEIGCEDKTLAFKMNGYISNANYSVKKCIFLLFINHRLVESTSLRKAIETVYAAYLPKNTHPFLYLSLEISPQNVDVNVHPTKHEVHFLHEESILERVQQHIESKLLGSNSSRMYFTQTLLPGLAGPSGEMVKSTTSLTSSSTSGSSDKVYAHQMVRTDSREQKLDAFLQPLSKPLSSQPQAIVTEDKTDISSGRARQQDEEMLELPAPAEVAAKNQSLEGDTTKGTSEMSEKRGPTSSNPRKRHREDSDVEMVEDDSRKEMTAACTPRRRIINLTSVLSLQEEINEQGHEVLREMLHNHSFVGCVNPQWALAQHQTKLYLLNTTKLSEELFYQILIYDFANFGVLRLSEPAPLFDLAMLALDSPESGWTEEDGPKEGLAEYIVEFLKKKAEMLADYFSLEIDEEGNLIGLPLLIDNYVPPLEGLPIFILRLATEVNWDEEKECFESLSKECAMFYSIRKQYISEESTLSGQQSEVPGSIPNSWKWTVEHIVYKALRSHILPPKHFTEDGNILQLANLPDLYKVFERC

SEQ ID NO: 238 - protein, 756 aa, Homo sapiens
MSFVAGVIRRLDETVVNRIAAGEVIQRPANAIKEMIENCLDAKLTSIQVIVKEGGLKLIQIQDNGTGIRKEDLDIVCERFTTSKLQSFEDLASISTYGFRGEALASISHVAHVTITTKTADGKCAYRASYSDGKLKAPPKPCAGNQGTQITVEDLFYNIATRRKALKNPSEEYGKILEVVGRYSVHNAGISFSVKKQGETVADVRTLPNASTVDNIRSVFGNAVSRELIEIGCEDKTLAFKMNGYISNANYSVKKCIFLLFINHRLVESTSLRKAIETVYAAYLPKNTHPFLYLSLEISPQNVDVNVHPTKHEVHFLHEESILERVQQHIESKLLGSNSSRMYFTQTLLPGLAGPSGEMVKSTTSLTSSSTSGSSDKVYAHQMVRTDSREQKLDAFLQPLSKPLSSQPQAIVTEDKTDISSGRARQQDEEMLELPAPAEVAAKNQSLEGDTTKGTSEMSEKRGPTSSNPRKRHREDSDVEMVEDDSRKEMTAACTPRRRIINLTSVLSLQEEINEQGHEVLREMLHNHSFVGCVNPQWALAQHQTKLYLLNTTKLSEELFYQILIYDFANFGVLRLSEPAPLFDLAMLALDSPESGWTEEDGPKEGLAEYIVEFLKKKAEMLADYFSLEIDEEGNLIGLPLLIDNYVPPLEGLPIFILRLATEVNWDEEKECFESLSKECAMFYSIRKQYISEESTLSGQQSEVPGSIPNSWKWTVEHIVYKALRSHILPPKHFTEDGNILQLANLPDLYKVFERC

SEQ ID NO: 239 - protein, 756 aa, Homo sapiens
MSFVAGVIRRLDETVVNRIAAGEVIQRPANAIKEMIENCLDAKPTSIQVIVKEGGLKLIQIQDNGTGIRKEDLDIVCERFTTSKLQSFEDLASISTYGFRGEALASISHVAHVTITTKTADGKCAYRASYSDGKLKAPPKPCAGNQGTQITVEDLFYNIATRRKALKNPSEEYGKILEVVGRYSVHNAGISFSVKKQGETVADVRTLPNASTVDNIRSVFGNAVSRELIEIGCEDKTLAFKMNGYISNANYSVKKCIFLLFINHRLVESTSLRKAIETVYAAYLPKNTHPFLYLSLEISPQNVDVNVHPTKHEVHFLHEESILERVQQHIESKLLGSNSSRMYFTQTLLPGLAGPSGEMVKSTTSLTSSSTSGSSDKVYAHQMVRTDSREQKLDAFLQPLSKPLSSQPQAIVTEDKTDISSGRARQQDEEMLELPAPAEVAAKNQSLEGDTTKGTSEMSEKRGPTSSNPRKRHREDSDVEMVEDDSRKEMTAACTPRRRIINLTSVLSLQEEINEQGHEVLREMLHNHSFVGCVNPQWALAQHQTKLYLLNTTKLSEELFYQILIYDFANFGVLRLSEPAPLFDLAMLALDSPESGWTEEDGPKEGLAEYIVEFLKKKAEMLADYFSLEIDEEGNLIGLPLLIDNYVPPLEGLPIFILRLATEVNWDEEKECFESLSKECAMFYSIRKQYISEESTLSGQQSEVPGSIPNSWKWTVEHIVYKALRSHILPPKHFTEDGNILQLANLPDLYKVFERC

SEQ ID NO: 240 - protein, 756 aa, Homo sapiens
MSFVAGVIRRLDETVVNRIAAGEVIQRPANAIKEMIENCLDAKTTSIQVIVKEGGLKLIQIQDNGTGIRKEDLDIVCERFTTSKLQSFEDLASISTYGFRGEALASISHVAHVTITTKTADGKCAYRASYSDGKLKAPPKPCAGNQGTQITVEDLFYNIATRRKALKNPSEEYGKILEVVGRYSVHNAGISFSVKKQGETVADVRTLPNASTVDNIRSVFGNAVSRELIEIGCEDKTLAFKMNGYISNANYSVKKCIFLLFINHRLVESTSLRKAIETVYAAYLPKNTHPFLYLSLEISPQNVDVNVHPTKHEVHFLHEESILERVQQHIESKLLGSNSSRMYFTQTLLPGLAGPSGEMVKSTTSLTSSSTSGSSDKVYAHQMVRTDSREQKLDAFLQPLSKPLSSQPQAIVTEDKTDISSGRARQQDEEMLELPAPAEVAAKNQSLEGDTTKGTSEMSEKRGPTSSNPRKRHREDSDVEMVEDDSRKEMTAACTPRRRIINLTSVLSLQEEINEQGHEVLREMLHNHSFVGCVNPQWALAQHQTKLYLLNTTKLSEELFYQILIYDFANFGVLRLSEPAPLFDLAMLALDSPESGWTEEDGPKEGLAEYIVEFLKKKAEMLADYFSLEIDEEGNLIGLPLLIDNYVPPLEGLPIFILRLATEVNWDEEKECFESLSKECAMFYSIRKQYISEESTLSGQQSEVPGSIPNSWKWTVEHIVYKALRSHILPPKHFTEDGNILQLANLPDLYKVFERC

SEQ ID NO: 241 - protein, 756 aa, Homo sapiens
MSFVAGVIRRLDETVVNRIAAGEVIQRPANAIKEMIENCLDAKWTSIQVIVKEGGLKLIQIQDNGTGIRKEDLDIVCERFTTSKLQSFEDLASISTYGFRGEALASISHVAHVTITTKTADGKCAYRASYSDGKLKAPPKPCAGNQGTQITVEDLFYNIATRRKALKNPSEEYGKILEVVGRYSVHNAGISFSVKKQGETVADVRTLPNASTVDNIRSVFGNAVSRELIEIGCEDKTLAFKMNGYISNANYSVKKCIFLLFINHRLVESTSLRKAIETVYAAYLPKNTHPFLYLSLEISPQNVDVNVHPTKHEVHFLHEESILERVQQHIESKLLGSNSSRMYFTQTLLPGLAGPSGEMVKSTTSLTSSSTSGSSDKVYAHQMVRTDSREQKLDAFLQPLSKPLSSQPQAIVTEDKTDISSGRARQQDEEMLELPAPAEVAAKNQSLEGDTTKGTSEMSEKRGPTSSNPRKRHREDSDVEMVEDDSRKEMTAACTPRRRIINLTSVLSLQEEINEQGHEVLREMLHNHSFVGCVNPQWALAQHQTKLYLLNTTKLSEELFYQILIYDFANFGVLRLSEPAPLFDLAMLALDSPESGWTEEDGPKEGLAEYIVEFLKKKAEMLADYFSLEIDEEGNLIGLPLLIDNYVPPLEGLPIFILRLATEVNWDEEKECFESLSKECAMFYSIRKQYISEESTLSGQQSEVPGSIPNSWKWTVEHIVYKALRSHILPPKHFTEDGNILQLANLPDLYKVFERC

SEQ ID NO: 242 - protein, 756 aa, Homo sapiens
MSFVAGVIRRLDETVVNRIAAGEVIQRPANAIKEMIENCLDAKYTSIQVIVKEGGLKLIQIQDNGTGIRKEDLDIVCERFTTSKLQSFEDLASISTYGFRGEALASISHVAHVTITTKTADGKCAYRASYSDGKLKAPPKPCAGNQGTQITVEDLFYNIATRRKALKNPSEEYGKILEVVGRYSVHNAGISFSVKKQGETVADVRTLPNASTVDNIRSVFGNAVSRELIEIGCEDKTLAFKMNGYISNANYSVKKCIFLLFINHRLVESTSLRKAIETVYAAYLPKNTHPFLYLSLEISPQNVDVNVHPTKHEVHFLHEESILERVQQHIESKLLGSNSSRMYFTQTLLPGLAGPSGEMVKSTTSLTSSSTSGSSDKVYAHQMVRTDSREQKLDAFLQPLSKPLSSQPQAIVTEDKTDISSGRARQQDEEMLELPAPAEVAAKNQSLEGDTTKGTSEMSEKRGPTSSNPRKRHREDSDVEMVEDDSRKEMTAACTPRRRIINLTSVLSLQEEINEQGHEVLREMLHNHSFVGCVNPQWALAQHQTKLYLLNTTKLSEELFYQILIYDFANFGVLRLSEPAPLFDLAMLALDSPESGWTEEDGPKEGLAEYIVEFLKKKAEMLADYFSLEIDEEGNLIGLPLLIDNYVPPLEGLPIFILRLATEVNWDEEKECFESLSKECAMFYSIRKQYISEESTLSGQQSEVPGSIPNSWKWTVEHIVYKALRSHILPPKHFTEDGNILQLANLPDLYKVFERC

SEQ ID NO: 243 - protein, 756 aa, Homo sapiens
MSFVAGVIRRLDETVVNRIAAGEVIQRPANAIKEMIENCLDAKVTSIQVIVKEGGLKLIQIQDNGTGIRKEDLDIVCERFTTSKLQSFEDLASISTYGFRGEALASISHVAHVTITTKTADGKCAYRASYSDGKLKAPPKPCAGNQGTQITVEDLFYNIATRRKALKNPSEEYGKILEVVGRYSVHNAGISFSVKKQGETVADVRTLPNASTVDNIRSVFGNAVSRELIEIGCEDKTLAFKMNGYISNANYSVKKCIFLLFINHRLVESTSLRKAIETVYAAYLPKNTHPFLYLSLEISPQNVDVNVHPTKHEVHFLHEESILERVQQHIESKLLGSNSSRMYFTQTLLPGLAGPSGEMVKSTTSLTSSSTSGSSDKVYAHQMVRTDSREQKLDAFLQPLSKPLSSQPQAIVTEDKTDISSGRARQQDEEMLELPAPAEVAAKNQSLEGDTTKGTSEMSEKRGPTSSNPRKRHREDSDVEMVEDDSRKEMTAACTPRRRIINLTSVLSLQEEINEQGHEVLREMLHNHSFVGCVNPQWALAQHQTKLYLLNTTKLSEELFYQILIYDFANFGVLRLSEPAPLFDLAMLALDSPESGWTEEDGPKEGLAEYIVEFLKKKAEMLADYFSLEIDEEGNLIGLPLLIDNYVPPLEGLPIFILRLATEVNWDEEKECFESLSKECAMFYSIRKQYISEESTLSGQQSEVPGSIPNSWKWTVEHIVYKALRSHILPPKHFTEDGNILQLANLPDLYKVFERC

SEQ ID NO: 244 - protein, 756 aa, Homo sapiens
MSFVAGVIRRLDETVVNRIAAGEVIQRPANAIKEMIENCLDAKSTSIQVIVKEGGLKLIQIQDNGTRIRKEDLDIVCERFTTSKLQSFEDLASISTYGFRGEALASISHVAHVTITTKTADGKCAYRASYSDGKLKAPPKPCAGNQGTQITVEDLFYNIATRRKALKNPSEEYGKILEVVGRYSVHNAGISFSVKKQGETVADVRTLPNASTVDNIRSVFGNAVSRELIEIGCEDKTLAFKMNGYISNANYSVKKCIFLLFINHRLVESTSLRKAIETVYAAYLPKNTHPFLYLSLEISPQNVDVNVHPTKHEVHFLHEESILERVQQHIESKLLGSNSSRMYFTQTLLPGLAGPSGEMVKSTTSLTSSSTSGSSDKVYAHQMVRTDSREQKLDAFLQPLSKPLSSQPQAIVTEDKTDISSGRARQQDEEMLELPAPAEVAAKNQSLEGDTTKGTSEMSEKRGPTSSNPRKRHREDSDVEMVEDDSRKEMTAACTPRRRIINLTSVLSLQEEINEQGHEVLREMLHNHSFVGCVNPQWALAQHQTKLYLLNTTKLSEELFYQILIYDFANFGVLRLSEPAPLFDLAMLALDSPESGWTEEDGPKEGLAEYIVEFLKKKAEMLADYFSLEIDEEGNLIGLPLLIDNYVPPLEGLPIFILRLATEVNWDEEKECFESLSKECAMFYSIRKQYISEESTLSGQQSEVPGSIPNSWKWTVEHIVYKALRSHILPPKHFTEDGNILQLANLPDLYKVFERC

SEQ ID NO: 245 - protein, 756 aa, Homo sapiens
MSFVAGVIRRLDETVVNRIAAGEVIQRPANAIKEMIENCLDAKSTSIQVIVKEGGLKLIQIQDNGTGNRKEDLDIVCERFTTSKLQSFEDLASISTYGFRGEALASISHVAHVTITTKTADGKCAYRASYSDGKLKAPPKPCAGNQGTQITVEDLFYNIATRRKALKNPSEEYGKILEVVGRYSVHNAGISFSVKKQGETVADVRTLPNASTVDNIRSVFGNAVSRELIEIGCEDKTLAFKMNGYISNANYSVKKCIFLLFINHRLVESTSLRKAIETVYAAYLPKNTHPFLYLSLEISPQNVDVNVHPTKHEVHFLHEESILERVQQHIESKLLGSNSSRMYFTQTLLPGLAGPSGEMVKSTTSLTSSSTSGSSDKVYAHQMVRTDSREQKLDAFLQPLSKPLSSQPQAIVTEDKTDISSGRARQQDEEMLELPAPAEVAAKNQSLEGDTTKGTSEMSEKRGPTSSNPRKRHREDSDVEMVEDDSRKEMTAACTPRRRIINLTSVLSLQEEINEQGHEVLREMLHNHSFVGCVNPQWALAQHQTKLYLLNTTKLSEELFYQILIYDFANFGVLRLSEPAPLFDLAMLALDSPESGWTEEDGPKEGLAEYIVEFLKKKAEMLADYFSLEIDEEGNLIGLPLLIDNYVPPLEGLPIFILRLATEVNWDEEKECFESLSKECAMFYSIRKQYISEESTLSGQQSEVPGSIPNSWKWTVEHIVYKALRSHILPPKHFTEDGNILQLANLPDLYKVFERC

SEQ ID NO: 246 - protein, 756 aa, Homo sapiens
MSFVAGVIRRLDETVVNRIAAGEVIQRPANAIKEMIENCLDAKSTSIQVIVKEGGLKLIQIQDNGTGIRKEDLDIVCERFTTSKLQSFEDLASISTYGFRGKALASISHVAHVTITTKTADGKCAYRASYSDGKLKAPPKPCAGNQGTQITVEDLFYNIATRRKALKNPSEEYGKILEVVGRYSVHNAGISFSVKKQGETVADVRTLPNASTVDNIRSVFGNAVSRELIEIGCEDKTLAFKMNGYISNANYSVKKCIFLLFINHRLVESTSLRKAIETVYAAYLPKNTHPFLYLSLEISPQNVDVNVHPTKHEVHFLHEESILERVQQHIESKLLGSNSSRMYFTQTLLPGLAGPSGEMVKSTTSLTSSSTSGSSDKVYAHQMVRTDSREQKLDAFLQPLSKPLSSQPQAIVTEDKTDISSGRARQQDEEMLELPAPAEVAAKNQSLEGDTTKGTSEMSEKRGPTSSNPRKRHREDSDVEMVEDDSRKEMTAACTPRRRIINLTSVLSLQEEINEQGHEVLREMLHNHSFVGCVNPQWALAQHQTKLYLLNTTKLSEELFYQILIYDFANFGVLRLSEPAPLFDLAMLALDSPESGWTEEDGPKEGLAEYIVEFLKKKAEMLADYFSLEIDEEGNLIGLPLLIDNYVPPLEGLPIFILRLATEVNWDEEKECFESLSKECAMFYSIRKQYISEESTLSGQQSEVPGSIPNSWKWTVEHIVYKALRSHILPPKHFTEDGNILQLANLPDLYKVFERC

SEQ ID NO: 247 - protein, 756 aa, Homo sapiens
MSFVAGVIRRLDETVVNRIAAGEVIQRPANAIKEMIENCLDAKSTSIQVIVKEGGLKLIQIQDNGTGIRKEDLDIVCERFTTSKLQSFEDLASISTYGFRGEALASRSHVAHVTITTKTADGKCAYRASYSDGKLKAPPKPCAGNQGTQITVEDLFYNIATRRKALKNPSEEYGKILEVVGRYSVHNAGISFSVKKQGETVADVRTLPNASTVDNIRSVFGNAVSRELIEIGCEDKTLAFKMNGYISNANYSVKKCIFLLFINHRLVESTSLRKAIETVYAAYLPKNTHPFLYLSLEISPQNVDVNVHPTKHEVHFLHEESILERVQQHIESKLLGSNSSRMYFTQTLLPGLAGPSGEMVKSTTSLTSSSTSGSSDKVYAHQMVRTDSREQKLDAFLQPLSKPLSSQPQAIVTEDKTDISSGRARQQDEEMLELPAPAEVAAKNQSLEGDTTKGTSEMSEKRGPTSSNPRKRHREDSDVEMVEDDSRKEMTAACTPRRRIINLTSVLSLQEEINEQGHEVLREMLHNHSFVGCVNPQWALAQHQTKLYLLNTTKLSEELFYQILIYDFANFGVLRLSEPAPLFDLAMLALDSPESGWTEEDGPKEGLAEYIVEFLKKKAEMLADYFSLEIDEEGNLIGLPLLIDNYVPPLEGLPIFILRLATEVNWDEEKECFESLSKECAMFYSIRKQYISEESTLSGQQSEVPGSIPNSWKWTVEHIVYKALRSHILPPKHFTEDGNILQLANLPDLYKVFERC

SEQ ID NO: 248 - protein, 756 aa, Homo sapiens
MSFVAGVIRRLDETVVNRIAAGEVIQRPANAIKEMIENCLDAKSTSIQVIVKEGGLKLIQIQDNGTGIRKEDLDIVCERFTTSKLQSFEDLASISTYGFRGEALASISHVAHVTITRKTADGKCAYRASYSDGKLKAPPKPCAGNQGTQITVEDLFYNIATRRKALKNPSEEYGKILEVVGRYSVHNAGISFSVKKQGETVADVRTLPNASTVDNIRSVFGNAVSRELIEIGCEDKTLAFKMNGYISNANYSVKKCIFLLFINHRLVESTSLRKAIETVYAAYLPKNTHPFLYLSLEISPQNVDVNVHPTKHEVHFLHEESILERVQQHIESKLLGSNSSRMYFTQTLLPGLAGPSGEMVKSTTSLTSSSTSGSSDKVYAHQMVRTDSREQKLDAFLQPLSKPLSSQPQAIVTEDKTDISSGRARQQDEEMLELPAPAEVAAKNQSLEGDTTKGTSEMSEKRGPTSSNPRKRHREDSDVEMVEDDSRKEMTAACTPRRRIINLTSVLSLQEEINEQGHEVLREMLHNHSFVGCVNPQWALAQHQTKLYLLNTTKLSEELFYQILIYDFANFGVLRLSEPAPLFDLAMLALDSPESGWTEEDGPKEGLAEYIVEFLKKKAEMLADYFSLEIDEEGNLIGLPLLIDNYVPPLEGLPIFILRLATEVNWDEEKECFESLSKECAMFYSIRKQYISEESTLSGQQSEVPGSIPNSWKWTVEHIVYKALRSHILPPKHFTEDGNILQLANLPDLYKVFERC

SEQ ID NO: 249 - protein, 756 aa, Homo sapiens
MSFVAGVIRRLDETVVNRIAAGEVIQRPANAIKEMIENCLDAKSTSIQVIVKEGGLKLIQIQDNGTGIRKEDLDIVCERFTTSKLQSFEDLASISTYGFRGEALASISHVAHVTITTKTADGKCAYRASYSDGKLKAPPKPCAGNQGTQITVEDLFYNIATRRKALKNPSEEYGKILEVVGRYSVHNAGISFSVKKQGETVADVRTLPNASTVDNIRSVFGNAVSRELIEIGCEDKTLAFKMNGYISNANYSVKKCIFLLFINHRLVESTSLRKAIETVYAAYLPKNTHPFLYLSLEISPQNVDVNVHPTKHEVHFLHEESILERVQQHIESKLLGSNSSRMYFTQTLLPGLAGPSGEMVKSTTSLTSSSTSGSSDKVYAHQMVRTDSREQKLDAFLQPLSKPLSSQPQAIVTEDKTDISSGRARQQDEEMLELPAPAEVAAKNQSLEGDTTKGTSEMSEKRGPTSSNPRKRHREDSDVEMVEDDSRKEMTAACTPRRRIINLTSVLSLQEEINEQGHEVLREMLHNHSFVGCVNPQWALALHQTKLYLLNTTKLSEELFYQILIYDFANFGVLRLSEPAPLFDLAMLALDSPESGWTEEDGPKEGLAEYIVEFLKKKAEMLADYFSLEIDEEGNLIGLPLLIDNYVPPLEGLPIFILRLATEVNWDEEKECFESLSKECAMFYSIRKQYISEESTLSGQQSEVPGSIPNSWKWTVEHIVYKALRSHILPPKHFTEDGNILQLANLPDLYKVFERC

SEQ ID NO: 250 - protein, 756 aa, Homo sapiens
MSFVAGVIRRLDETVVNRIAAGEVIQRPANAIKEMIENCLDAKSTSIQVIVKEGGLKLIQIQDNGTGIRKEDLDIVCERFTTSKLQSFEDLASISTYGFRGEALASISHVAHVTITTKTADGKCAYRASYSDGKLKAPPKPCAGNQGTQITVEDLFYNIATRRKALKNPSEEYGKILEVVGRYSVHNAGISFSVKKQGETVADVRTLPNASTVDNIRSVFGNAVSRELIEIGCEDKTLAFKMNGYISNANYSVKKCIFLLFINHRLVESTSLRKAIETVYAAYLPKNTHPFLYLSLEISPQNVDVNVHPTKHEVHFLHEESILERVQQHIESKLLGSNSSRMYFTQTLLPGLAGPSGEMVKSTTSLTSSSTSGSSDKVYAHQMVRTDSREQKLDAFLQPLSKPLSSQPQAIVTEDKTDISSGRARQQDEEMLELPAPAEVAAKNQSLEGDTTKGTSEMSEKRGPTSSNPRKRHREDSDVEMVEDDSRKEMTAACTPRRRIINLTSVLSLQEEINEQGHEVLREMLHNHSFVGCVNPQWALAQHQTKLYLLNTTKLSEELFYQILIYDFANFGVLRLSEPAPLFDLAMLALDSPESGWTEEDGPKEGLAEYIVEFLKKKAEMLADYFSLEIDEEGNLIGLPLLIDNYVPPLEGLPIFILPLATEVNWDEEKECFESLSKECAMFYSIRKQYISEESTLSGQQSEVPGSIPNSWKWTVEHIVYKALRSHILPPKHFTEDGNILQLANLPDLYKVFERC

SEQ ID NO: 251 - protein, 756 aa, Homo sapiens
MSFVAGVIRRLDETVVNRIAAGEVIQRPANAIKEMIENCLDAKSTSIQVIVKEGGLKLIQIQDNGTGIRKEDLDIVCERFTTSKLQSFEDLASISTYGFRGEALASISHVAHVTITTKTADGKCAYRASYSDGKLKAPPKPCAGNQGTQITVEDLFYNIATRRKALKNPSEEYGKILEVVGRYSVHNAGISFSVKKQGETVADVRTLPNASTVDNICSVFGNAVSRELIEIGCEDKTLAFKMNGYISNANYSVKKCIFLLFINHRLVESTSLRKAIETVYAAYLPKNTHPFLYLSLEISPQNVDVNVHPTKHEVHFLHEESILERVQQHIESKLLGSNSSRMYFTQTLLPGLAGPSGEMVKSTTSLTSSSTSGSSDKVYAHQMVRTDSREQKLDAFLQPLSKPLSSQPQAIVTEDKTDISSGRARQQDEEMLELPAPAEVAAKNQSLEGDTTKGTSEMSEKRGPTSSNPRKRHREDSDVEMVEDDSRKEMTAACTPRRRIINLTSVLSLQEEINEQGHEVLREMLHNHSFVGCVNPQWALAQHQTKLYLLNTTKLSEELFYQILIYDFANFGVLRLSEPAPLFDLAMLALDSPESGWTEEDGPKEGLAEYIVEFLKKKAEMLADYFSLEIDEEGNLIGLPLLIDNYVPPLEGLPIFILRLATEVNWDEEKECFESLSKECAMFYSIRKQYISEESTLSGQQSEVPGSIPNSWKWTVEHIVYKALRSHILPPKHFTEDGNILQLANLPDLYKVFERC

SEQ ID NO: 252 - protein, 756 aa, Homo sapiens
MSFVAGVIRRLDETVVNRIAAGEVIQRPANAIKEMIENCLDAKSTSIQVIVKEGGLKLIQIQDNGTGIRKEDLDIVCERFTTSKLQSFEDLASISTYGFRGEALASISHVAHVTITTKTADGKCAYRASYSDGKLKAPPKPCAGNQGTQITVEDLFYNIATRRKALKNPSEEYGKILEVVGRYSVHNAGISFSVKKQGETVADVRTLPNASTVDNIRSVFGNAVSRELIEIGCEDKTLAFKMNGYISNANYSVKKCIFLLFINHCLVESTSLRKAIETVYAAYLPKNTHPFLYLSLEISPQNVDVNVHPTKHEVHFLHEESILERVQQHIESKLLGSNSSRMYFTQTLLPGLAGPSGEMVKSTTSLTSSSTSGSSDKVYAHQMVRTDSREQKLDAFLQPLSKPLSSQPQAIVTEDKTDISSGRARQQDEEMLELPAPAEVAAKNQSLEGDTTKGTSEMSEKRGPTSSNPRKRHREDSDVEMVEDDSRKEMTAACTPRRRIINLTSVLSLQEEINEQGHEVLREMLHNHSFVGCVNPQWALAQHQTKLYLLNTTKLSEELFYQILIYDFANFGVLRLSEPAPLFDLAMLALDSPESGWTEEDGPKEGLAEYIVEFLKKKAEMLADYFSLEIDEEGNLIGLPLLIDNYVPPLEGLPIFILRLATEVNWDEEKECFESLSKECAMFYSIRKQYISEESTLSGQQSEVPGSIPNSWKWTVEHIVYKALRSHILPPKHFTEDGNILQLANLPDLYKVFERC

SEQ ID NO: 253 - protein, 756 aa, Homo sapiens
MSFVAGVIRRLDETVVNRIAAGEVIQRPANAIKEMIENCLDAKSTSIQVIVKEGGLKLIQIQDNGTGIRKEDLDIVCERFTTSKLQSFEDLASISTYGFRGEALASISHVAHVTITTKTADGKCAYRASYSDGKLKAPPKPCAGNQGTQITVEDLFYNIATRRKALKNPSEEYGKILEVVGRYSVHNAGISFSVKKQGETVADVRTLPNASTVDNIRSVFGNAVSRELIEIGCEDKTLAFKMNGYISNANYSVKKCIFLLFINHHLVESTSLRKAIETVYAAYLPKNTHPFLYLSLEISPQNVDVNVHPTKHEVHFLHEESILERVQQHIESKLLGSNSSRMYFTQTLLPGLAGPSGEMVKSTTSLTSSSTSGSSDKVYAHQMVRTDSREQKLDAFLQPLSKPLSSQPQAIVTEDKTDISSGRARQQDEEMLELPAPAEVAAKNQSLEGDTTKGTSEMSEKRGPTSSNPRKRHREDSDVEMVEDDSRKEMTAACTPRRRIINLTSVLSLQEEINEQGHEVLREMLHNHSFVGCVNPQWALAQHQTKLYLLNTTKLSEELFYQILIYDFANFGVLRLSEPAPLFDLAMLALDSPESGWTEEDGPKEGLAEYIVEFLKKKAEMLADYFSLEIDEEGNLIGLPLLIDNYVPPLEGLPIFILRLATEVNWDEEKECFESLSKECAMFYSIRKQYISEESTLSGQQSEVPGSIPNSWKWTVEHIVYKALRSHILPPKHFTEDGNILQLANLPDLYKVFERC

SEQ ID NO: 254 - protein, 756 aa, Homo sapiens
MSFVAGVIRRLDETVVNRIAAGEVIQRPANAIKEMIENCLDAKSTSIQVIVKEGGLKLIQIQDNGTGIRKEDLDIVCERFTTSKLQSFEDLASISTYGFRGEALASISHVAHVTITTKTADGKCAYRASYSDGKLKAPPKPCAGNQGTQITVEDLFYNIATRRKALKNPSEEYGKILEVVGRYSVHNAGISFSVKKQGETVADVRTLPNASTVDNIRSVFGNAVSRELIEIGCEDKTLAFKMNGYISNANYSVKKCIFLLFINHRLVESTSLRKAIETVYAAYLPKNTHPFLYLSLEISPQNVDVNVHPTKHEVHFLHEESILERIQQHIESKLLGSNSSRMYFTQTLLPGLAGPSGEMVKSTTSLTSSSTSGSSDKVYAHQMVRTDSREQKLDAFLQPLSKPLSSQPQAIVTEDKTDISSGRARQQDEEMLELPAPAEVAAKNQSLEGDTTKGTSEMSEKRGPTSSNPRKRHREDSDVEMVEDDSRKEMTAACTPRRRIINLTSVLSLQEEINEQGHEVLREMLHNHSFVGCVNPQWALAQHQTKLYLLNTTKLSEELFYQILIYDFANFGVLRLSEPAPLFDLAMLALDSPESGWTEEDGPKEGLAEYIVEFLKKKAEMLADYFSLEIDEEGNLIGLPLLIDNYVPPLEGLPIFILRLATEVNWDEEKECFESLSKECAMFYSIRKQYISEESTLSGQQSEVPGSIPNSWKWTVEHIVYKALRSHILPPKHFTEDGNILQLANLPDLYKVFERC

SEQ ID NO: 255 - protein, 756 aa, Homo sapiens
MSFVAGVIRRLDETVVNRIAAGEVIQRPANAIKEMIENCLDAKSTSIQVIVKEGGLKLIQIKDNGTGIRKEDLDIVCERFTTSKLQSFEDLASISTYGFRGEALASISHVAHVTITTKTADGKCAYRASYSDGKLKAPPKPCAGNQGTQITVEDLFYNIATRRKALKNPSEEYGKILEVVGRYSVHNAGISFSVKKQGETVADVRTLPNASTVDNIRSVFGNAVSRELIEIGCEDKTLAFKMNGYISNANYSVKKCIFLLFINHRLVESTSLRKAIETVYAAYLPKNTHPFLYLSLEISPQNVDVNVHPTKHEVHFLHEESILERVQQHIESKLLGSNSSRMYFTQTLLPGLAGPSGEMVKSTTSLTSSSTSGSSDKVYAHQMVRTDSREQKLDAFLQPLSKPLSSQPQAIVTEDKTDISSGRARQQDEEMLELPAPAEVAAKNQSLEGDTTKGTSEMSEKRGPTSSNPRKRHREDSDVEMVEDDSRKEMTAACTPRRRIINLTSVLSLQEEINEQGHEVLREMLHNHSFVGCVNPQWALAQHQTKLYLLNTTKLSEELFYQILIYDFANFGVLRLSEPAPLFDLAMLALDSPESGWTEEDGPKEGLAEYIVEFLKKKAEMLADYFSLEIDEEGNLIGLPLLIDNYVPPLEGLPIFILRLATEVNWDEEKECFESLSKECAMFYSIRKQYISEESTLSGQQSEVPGSIPNSWKWTVEHIVYKALRSHILPPKHFTEDGNILQLANLPDLYKVFERC

SEQ ID NO: 256 - protein, 756 aa, Homo sapiens
MSFVAGVIRRLDETVVNRIAAGEVIQRPANAIKEMIENCLDAKSTSIQVIVKEGGLKLIQIQDNGTGIKKEDLDIVCERFTTSKLQSFEDLASISTYGFRGEALASISHVAHVTITTKTADGKCAYRASYSDGKLKAPPKPCAGNQGTQITVEDLFYNIATRRKALKNPSEEYGKILEVVGRYSVHNAGISFSVKKQGETVADVRTLPNASTVDNIRSVFGNAVSRELIEIGCEDKTLAFKMNGYISNANYSVKKCIFLLFINHRLVESTSLRKAIETVYAAYLPKNTHPFLYLSLEISPQNVDVNVHPTKHEVHFLHEESILERVQQHIESKLLGSNSSRMYFTQTLLPGLAGPSGEMVKSTTSLTSSSTSGSSDKVYAHQMVRTDSREQKLDAFLQPLSKPLSSQPQAIVTEDKTDISSGRARQQDEEMLELPAPAEVAAKNQSLEGDTTKGTSEMSEKRGPTSSNPRKRHREDSDVEMVEDDSRKEMTAACTPRRRIINLTSVLSLQEEINEQGHEVLREMLHNHSFVGCVNPQWALAQHQTKLYLLNTTKLSEELFYQILIYDFANFGVLRLSEPAPLFDLAMLALDSPESGWTEEDGPKEGLAEYIVEFLKKKAEMLADYFSLEIDEEGNLIGLPLLIDNYVPPLEGLPIFILRLATEVNWDEEKECFESLSKECAMFYSIRKQYISEESTLSGQQSEVPGSIPNSWKWTVEHIVYKALRSHILPPKHFTEDGNILQLANLPDLYKVFERC

SEQ ID NO: 257 - protein, 756 aa, Homo sapiens [sequence omitted]

SEQ ID NO: 258 - protein, 756 aa, Homo sapiens
MSFVAGVIRRLDETVVNRIAAGEVIQRPANAIKEMIENCLDAKSTSIQVIVKEGGLKLIQIQDNGTGIRKEDLDIVCERFTTSKLQSFEDLASISTYGFRGEALASISHVAHVTITTKTADGKCAYRASYSDGKLKAPPKPCAGNQGTQITVEDLFYNIATRRKALKNPSEEYGKILEVVGRYSVHNAGISFSVKKQGETVADVRTLPNASTVDNIRSVFGNAVSRELIEIGCEDKTLAFKMNGYISNANYSVKKCIFLLFINHRLVESTSLRKAIETVYAAYLPKNTHPFLYLSLEISPQNVDVNVHPTKHEVHFLHEESILERVQQHIESKLLGSNSSRMYFTQTLLPGLAGPSGEMVKSTTSLTSSSTSGSSDKVYAHQMVRTDSREQKLDAFLQPLSKPLSSQPQAIVTEDKTDISSGRARQQDEEMLELPAPAEVAAKNQSLEGDTTKGTSEMSEKRGPTSSNPRKRHREDSDVEMVEDDSRKEMTAACTPRRRIINLTSVLSLQEEINEQGHEVLREMLHNHSFVGCVNPQWALAQHQTKLYLLNTTKLSEELFYQILIYDFANFGVLRLSEPAPLFDLAMLALDSPESGWTEEDGPKEGLAEYIVEFLKKKAEMLADYFSLEIDEEGNLIGLPLLIDNYVPPLEGLPIFILRLATEVNWDEEKECFESLSKECTMFYSIRKQYISEESTLSGQQSEVPGSIPNSWKWTVEHIVYKALRSHILPPKHFTEDGNILQLANLPDLYKVFERC

SEQ ID NO: 259 - protein, 756 aa, Homo sapiens
MSFVAGVIRRLDETVVNRIAAGEVFQRPANAIKEMIENCLDAKSTSIQVIVKEGGLKLIQIQDNGTGIRKEDLDIVCERFTTSKLQSFEDLASISTYGFRGEALASISHVAHVTITTKTADGKCAYRASYSDGKLKAPPKPCAGNQGTQITVEDLFYNIATRRKALKNPSEEYGKILEVVGRYSVHNAGISFSVKKQGETVADVRTLPNASTVDNIRSVFGNAVSRELIEIGCEDKTLAFKMNGYISNANYSVKKCIFLLFINHRLVESTSLRKAIETVYAAYLPKNTHPFLYLSLEISPQNVDVNVHPTKHEVHFLHEESILERVQQHIESKLLGSNSSRMYFTQTLLPGLAGPSGEMVKSTTSLTSSSTSGSSDKVYAHQMVRTDSREQKLDAFLQPLSKPLSSQPQAIVTEDKTDISSGRARQQDEEMLELPAPAEVAAKNQSLEGDTTKGTSEMSEKRGPTSSNPRKRHREDSDVEMVEDDSRKEMTAACTPRRRIINLTSVLSLQEEINEQGHEVLREMLHNHSFVGCVNPQWALAQHQTKLYLLNTTKLSEELFYQILIYDFANFGVLRLSEPAPLFDLAMLALDSPESGWTEEDGPKEGLAEYIVEFLKKKAEMLADYFSLEIDEEGNLIGLPLLIDNYVPPLEGLPIFILRLATEVNWDEEKECFESLSKECAMFYSIRKQYISEESTLSGQQSEVPGSIPNSWKWTVEHIVYKALRSHILPPKHFTEDGNILQLANLPDLYKVFERC

SEQ ID NO: 260 - protein, 756 aa, Homo sapiens
MSFVAGVIRRLDETVVNRIAAGEVTQRPANAIKEMIENCLDAKSTSIQVIVKEGGLKLIQIQDNGTGIRKEDLDIVCERFTTSKLQSFEDLASISTYGFRGEALASISHVAHVTITTKTADGKCAYRASYSDGKLKAPPKPCAGNQGTQITVEDLFYNIATRRKALKNPSEEYGKILEVVGRYSVHNAGISFSVKKQGETVADVRTLPNASTVDNIRSVFGNAVSRELIEIGCEDKTLAFKMNGYISNANYSVKKCIFLLFINHRLVESTSLRKAIETVYAAYLPKNTHPFLYLSLEISPQNVDVNVHPTKHEVHFLHEESILERVQQHIESKLLGSNSSRMYFTQTLLPGLAGPSGEMVKSTTSLTSSSTSGSSDKVYAHQMVRTDSREQKLDAFLQPLSKPLSSQPQAIVTEDKTDISSGRARQQDEEMLELPAPAEVAAKNQSLEGDTTKGTSEMSEKRGPTSSNPRKRHREDSDVEMVEDDSRKEMTAACTPRRRIINLTSVLSLQEEINEQGHEVLREMLHNHSFVGCVNPQWALAQHQTKLYLLNTTKLSEELFYQILIYDFANFGVLRLSEPAPLFDLAMLALDSPESGWTEEDGPKEGLAEYIVEFLKKKAEMLADYFSLEIDEEGNLIGLPLLIDNYVPPLEGLPIFILRLATEVNWDEEKECFESLSKECAMFYSIRKQYISEESTLSGQQSEVPGSIPNSWKWTVEHIVYKALRSHILPPKHFTEDGNILQLANLPDLYKVFERC

SEQ ID NO: 261 - protein, 756 aa, Homo sapiens
MSFVAGVIRRLDETVVNRIAAGEVIQRLANAIKEMIENCLDAKSTSIQVIVKEGGLKLIQIQDNGTGIRKEDLDIVCERFTTSKLQSFEDLASISTYGFRGEALASISHVAHVTITTKTADGKCAYRASYSDGKLKAPPKPCAGNQGTQITVEDLFYNIATRRKALKNPSEEYGKILEVVGRYSVHNAGISFSVKKQGETVADVRTLPNASTVDNIRSVFGNAVSRELIEIGCEDKTLAFKMNGYISNANYSVKKCIFLLFINHRLVESTSLRKAIETVYAAYLPKNTHPFLYLSLEISPQNVDVNVHPTKHEVHFLHEESILERVQQHIESKLLGSNSSRMYFTQTLLPGLAGPSGEMVKSTTSLTSSSTSGSSDKVYAHQMVRTDSREQKLDAFLQPLSKPLSSQPQAIVTEDKTDISSGRARQQDEEMLELPAPAEVAAKNQSLEGDTTKGTSEMSEKRGPTSSNPRKRHREDSDVEMVEDDSRKEMTAACTPRRRIINLTSVLSLQEEINEQGHEVLREMLHNHSFVGCVNPQWALAQHQTKLYLLNTTKLSEELFYQILIYDFANFGVLRLSEPAPLFDLAMLALDSPESGWTEEDGPKEGLAEYIVEFLKKKAEMLADYFSLEIDEEGNLIGLPLLIDNYVPPLEGLPIFILRLATEVNWDEEKECFESLSKECAMFYSIRKQYISEESTLSGQQSEVPGSIPNSWKWTVEHIVYKALRSHILPPKHFTEDGNILQLANLPDLYKVFERC

SEQ ID NO: 262 - protein, 756 aa, Homo sapiens
MSFVAGVIRRLDETVVNRIAAGEVIQRPANAIKEMIENCLDAKSTSIQVIVKEGGLKLIQIQDSGTGIRKEDLDIVCERFTTSKLQSFEDLASISTYGFRGEALASISHVAHVTITTKTADGKCAYRASYSDGKLKAPPKPCAGNQGTQITVEDLFYNIATRRKALKNPSEEYGKILEVVGRYSVHNAGISFSVKKQGETVADVRTLPNASTVDNIRSVFGNAVSRELIEIGCEDKTLAFKMNGYISNANYSVKKCIFLLFINHRLVESTSLRKAIETVYAAYLPKNTHPFLYLSLEISPQNVDVNVHPTKHEVHFLHEESILERVQQHIESKLLGSNSSRMYFTQTLLPGLAGPSGEMVKSTTSLTSSSTSGSSDKVYAHQMVRTDSREQKLDAFLQPLSKPLSSQPQAIVTEDKTDISSGRARQQDEEMLELPAPAEVAAKNQSLEGDTTKGTSEMSEKRGPTSSNPRKRHREDSDVEMVEDDSRKEMTAACTPRRRIINLTSVLSLQEEINEQGHEVLREMLHNHSFVGCVNPQWALAQHQTKLYLLNTTKLSEELFYQILIYDFANFGVLRLSEPAPLFDLAMLALDSPESGWTEEDGPKEGLAEYIVEFLKKKAEMLADYFSLEIDEEGNLIGLPLLIDNYVPPLEGLPIFILRLATEVNWDEEKECFESLSKECAMFYSIRKQYISEESTLSGQQSEVPGSIPNSWKWTVEHIVYKALRSHILPPKHFTEDGNILQLANLPDLYKVFERC

SEQ ID NO: 263 - protein, 756 aa, Homo sapiens
MSFVAGVIRRLDETVVNRIAAGEVIQRPANAIKEMIENCLDAKSTSIQVIVKEGGLKLIQIQDNGTGIRKEDLDIVCERFTTSKLQSFEDLASISTYGFRGEALASISHVVHVTITTKTADGKCAYRASYSDGKLKAPPKPCAGNQGTQITVEDLFYNIATRRKALKNPSEEYGKILEVVGRYSVHNAGISFSVKKQGETVADVRTLPNASTVDNIRSVFGNAVSRELIEIGCEDKTLAFKMNGYISNANYSVKKCIFLLFINHRLVESTSLRKAIETVYAAYLPKNTHPFLYLSLEISPQNVDVNVHPTKHEVHFLHEESILERVQQHIESKLLGSNSSRMYFTQTLLPGLAGPSGEMVKSTTSLTSSSTSGSSDKVYAHQMVRTDSREQKLDAFLQPLSKPLSSQPQAIVTEDKTDISSGRARQQDEEMLELPAPAEVAAKNQSLEGDTTKGTSEMSEKRGPTSSNPRKRHREDSDVEMVEDDSRKEMTAACTPRRRIINLTSVLSLQEEINEQGHEVLREMLHNHSFVGCVNPQWALAQHQTKLYLLNTTKLSEELFYQILIYDFANFGVLRLSEPAPLFDLAMLALDSPESGWTEEDGPKEGLAEYIVEFLKKKAEMLADYFSLEIDEEGNLIGLPLLIDNYVPPLEGLPIFILRLATEVNWDEEKECFESLSKECAMFYSIRKQYISEESTLSGQQSEVPGSIPNSWKWTVEHIVYKALRSHILPPKHFTEDGNILQLANLPDLYKVFERC

SEQ ID NO: 264 - protein, 755 aa, Homo sapiens
MSFVAGVIRRLDETVVNRIAAGEVIQRPANAIKEMIENCLDAKSTSIQVIVKEGGLKLIQIQDNGTGIRKEDLDIVCERFTTSKLQSFEDLASISTYGFRGEALASISHVAHVTITTKTADGKCAYRASYSDGKLKAPPKPCAGNQGTQITVEDLFYNIATRRKALKNPSEEYGKILEVVGRYSVHNAGISFSVKKQGETVADVRTLPNASTVDNIRSVFGNAVSRELIEIGCEDKTLAFKMNGYISNANYSVKKCIFLLFNHRLVESTSLRKAIETVYAAYLPKNTHPFLYLSLEISPQNVDVNVHPTKHEVHFLHEESILERVQQHIESKLLGSNSSRMYFTQTLLPGLAGPSGEMVKSTTSLTSSSTSGSSDKVYAHQMVRTDSREQKLDAFLQPLSKPLSSQPQAIVTEDKTDISSGRARQQDEEMLELPAPAEVAAKNQSLEGDTTKGTSEMSEKRGPTSSNPRKRHREDSDVEMVEDDSRKEMTAACTPRRRIINLTSVLSLQEEINEQGHEVLREMLHNHSFVGCVNPQWALAQHQTKLYLLNTTKLSEELFYQILIYDFANFGVLRLSEPAPLFDLAMLALDSPESGWTEEDGPKEGLAEYIVEFLKKKAEMLADYFSLEIDEEGNLIGLPLLIDNYVPPLEGLPIFILRLATEVNWDEEKECFESLSKECAMFYSIRKQYISEESTLSGQQSEVPGSIPNSWKWTVEHIVYKALRSHILPPKHFTEDGNILQLANLPDLYKVFERC

SEQ ID NO: 265 - protein, 756 aa, Homo sapiens
MSFVAGVIRRLDETVVNRIAAGEVIQRPANAIKEMIENCLDAKSTSIQVIVKEGGLKLIQIQDNGTGIRKEDLDIVCERFTTSKLQSFEDLASISTYGFRGEALASISHVAHVTITTKTADGKCAYRASYSDGKLKAPPKPCAGNQGTQITVEDLFYNIATRRKALKNPSEEYGKILEVVGRYSVHNAGISFSVKKQGETVADVRTLPNASTVDNIRSVFGNAVSRELIEIGCEDKTLAFKMNGYISNANYSVKKCIFLLFINHRLVESTSLRKAIETVYAAYLPKNTHPFLYLSLEISPQNVDVNVHPTKHEVHFLHEESILERVQQHIESKLLGSNSSRMYFTQTLLPGLAGPSGEMVKSTTSLTSSSTSGSSDKVYAHQMVRTDSREQKLDAFLQPLSKPLSSQPQAIVTEDKTDISSGRARQQDEEMLELPAPAEVAAKNQSLEGDTTKGTSEMSEKRGPTSSNPRKRHREDSDVEMVEDDSRKEMTAACTPRRRIINLTSVLSLQEEINEQGHEVLREMLHNHSFVGCVNPQWALAQHQTKLYLLNTTKLSEELFYQILIYDFANFGVLRLSEPAPLFDLAMLALDSPESGWTEEDGPKEGLAEYIVEFLKKKAEMLADYFSLEIDEEGNLIGLPLLIDNYVPPLEGRPIFILRLATEVNWDEEKECFESLSKECAMFYSIRKQYISEESTLSGQQSEVPGSIPNSWKWTVEHIVYKALRSHILPPKHFTEDGNILQLANLPDLYKVFERC

SEQ ID NO: 266 - protein, 756 aa, Homo sapiens
MSFVAGVIRRLDETVVNRIAAGEVIQRPANAIKEMIENCLDAKSTSIQVIVKEGGLKLIQIQDNGTGIRKEDLDIVCERFTTSKLQSFEDLASISTYGFRGEALASISHVAHVTITTKTADGKCAYRASYSDGKLKAPPKPCAGNQGTQITVEDLFYNIATRRKALKNPSEEYGKILEVVGRYSVHNAGISFSVKKQGETVADVRTLPNASTVDNIRSVFGNAVSRELIEIGCEDKTLAFKMNGYISNANYSVKKCIFLLFINHRLVESTSLRKAIETVYAAYLPKNTHPFLYLSLEISPQNVDVNVHPTKHEVHFLHEESILERVQQHIESKLLGSNSSRMYFTQTLLPGLAGPSGEMVKSTTSLTSSSTSGSSDKVYAHQMVRTDSREQKLDAFLQPLSKPLSSQPQAIVTEDKTDISSGRARQQDEEMLELPAPAEVAAKNQSLEGDTTKGTSEMSEKRGPTSSNPRKRHREDSDVEMVEDDSRKEMTAACTPRRRIINLTSVLSLQEEINEQGHEVLREMLHNHSFVGCVNPQWALAQHQTKLYLLNTTKLSEELFYQILIYDFANFGVLRLSEPAPLFDLAMLALDSPESGWTEEDGPKEGLAEYIVEFLKKKAEMLADYFSLEIDEEGNLIGLPLLIDNYVPPLEGLLIFILRLATEVNWDEEKECFESLSKECAMFYSIRKQYISEESTLSGQQSEVPGSIPNSWKWTVEHIVYKALRSHILPPKHFTEDGNILQLANLPDLYKVFERC

SEQ ID NO: 267 - protein, 756 aa, Homo sapiens
MSFVAGVIRRLDETVVNRIAAGEVIQRPANAIKEMIENCLDAKSTSIQVIVKEGGLKLIQIQDNGTGIRKEDLDIVCERFTTSKLQSFEDLASISTYGFRGEALASISHVAHVTITTKTADGKCAYRASYSDGKLKAPPKPCAGNQGTQITVEDLFYNIATRRKALKNPSEEYGKILEVVGRYSVHNAGISFSVKKQGETVADVRTLPNASTVDNIRSVFGNAVSRELIEIGCEDKTLAFKMNGYISNANYSVKKCIFLLFINHRLVESTSLRKAIETVYAAYLPKNTHPFLYLSLEISPQNVDVNVHPTKHEVHFLHEESILERVQQHIESKLLGSNSSRMYFTQTLLPGLAGPSGEMVKSTTSLTSSSTSGSSDKVYAHQMVRTDSREQKLDAFLQPLSKPLSSQPQAIVTEDKTDISSGRARQQDEEMLELPAPAEVAAKNQSLEGDTTKGTSEMSEKRGPTSSNPRKRHREDSDVEMVEDDSRKEMTAACTPRRRIINLTSVLSLQEEINEQGHEVLREMLHNHSFVGCVNPQWALAQHQTKLYLLNTTKLSEELFYQILIYDFANFGVLRLSEPAPLFDLAMLALDSPESGWTEEDGPKEGLAEYIVEFLKKKAEMLADYFSLEIDEEGNLIGLPLLIDNYVPPLEGLPIFILLLATEVNWDEEKECFESLSKECAMFYSIRKQYISEESTLSGQQSEVPGSIPNSWKWTVEHIVYKALRSHILPPKHFTEDGNILQLANLPDLYKVFERC

SEQ ID NO: 268 - protein, 756 aa, Homo sapiens
MSFVAGVIRRLDETVVNRIAAGEVIQRPANAIKEMIENCLDAKSTSIQVIVKEGGLKLIQIQDNGTGIRKEDLDIVCERFTISKLQSFEDLASISTYGFRGEALASISHVAHVTITTKTADGKCAYRASYSDGKLKAPPKPCAGNQGTQITVEDLFYNIATRRKALKNPSEEYGKILEVVGRYSVHNAGISFSVKKQGETVADVRTLPNASTVDNIRSVFGNAVSRELIEIGCEDKTLAFKMNGYISNANYSVKKCIFLLFINHRLVESTSLRKAIETVYAAYLPKNTHPFLYLSLEISPQNVDVNVHPTKHEVHFLHEESILERVQQHIESKLLGSNSSRMYFTQTLLPGLAGPSGEMVKSTTSLTSSSTSGSSDKVYAHQMVRTDSREQKLDAFLQPLSKPLSSQPQAIVTEDKTDISSGRARQQDEEMLELPAPAEVAAKNQSLEGDTTKGTSEMSEKRGPTSSNPRKRHREDSDVEMVEDDSRKEMTAACTPRRRIINLTSVLSLQEEINEQGHEVLREMLHNHSFVGCVNPQWALAQHQTKLYLLNTTKLSEELFYQILIYDFANFGVLRLSEPAPLFDLAMLALDSPESGWTEEDGPKEGLAEYIVEFLKKKAEMLADYFSLEIDEEGNLIGLPLLIDNYVPPLEGLPIFILRLATEVNWDEEKECFESLSKECAMFYSIRKQYISEESTLSGQQSEVPGSIPNSWKWTVEHIVYKALRSHILPPKHFTEDGNILQLANLPDLYKVFERC

SEQ ID NO: 269 - protein, 756 aa, Homo sapiens
MSFVAGVIRRLDETVVNRIAAGEVIQRPANAIKEMIENCLDAKSTSIQVIVKEGGLKLIQIQDNGTGIRKEDLDIVCERFTTSELQSFEDLASISTYGFRGEALASISHVAHVTITTKTADGKCAYRASYSDGKLKAPPKPCAGNQGTQITVEDLFYNIATRRKALKNPSEEYGKILEVVGRYSVHNAGISFSVKKQGETVADVRTLPNASTVDNIRSVFGNAVSRELIEIGCEDKTLAFKMNGYISNANYSVKKCIFLLFINHRLVESTSLRKAIETVYAAYLPKNTHPFLYLSLEISPQNVDVNVHPTKHEVHFLHEESILERVQQHIESKLLGSNSSRMYFTQTLLPGLAGPSGEMVKSTTSLTSSSTSGSSDKVYAHQMVRTDSREQKLDAFLQPLSKPLSSQPQAIVTEDKTDISSGRARQQDEEMLELPAPAEVAAKNQSLEGDTTKGTSEMSEKRGPTSSNPRKRHREDSDVEMVEDDSRKEMTAACTPRRRIINLTSVLSLQEEINEQGHEVLREMLHNHSFVGCVNPQWALAQHQTKLYLLNTTKLSEELFYQILIYDFANFGVLRLSEPAPLFDLAMLALDSPESGWTEEDGPKEGLAEYIVEFLKKKAEMLADYFSLEIDEEGNLIGLPLLIDNYVPPLEGLPIFILRLATEVNWDEEKECFESLSKECAMFYSIRKQYISEESTLSGQQSEVPGSIPNSWKWTVEHIVYKALRSHILPPKHFTEDGNILQLANLPDLYKVFERC

SEQ ID NO: 270 - protein, 756 aa, Homo sapiens
MSFVAGVIRRLDETVVNRIAAGEVIQRPANAIKEMIENCLDAKSTSIQVIVKEGGLKLIQIQDNGTGIRKEDLDIVCERFTTSKLQSFEDLASISTYGFRGEALASISHVAHVTITTKTADGKCAYRASYSDGKLKAPPKPCAGNQGTQITVEDLFYNIATRRKALKNPSEEYGKILEVVGRYSVHNAGISFSVKKQGETVADVRTLPNASTVDNIRSVFGNAVSRELIEIGCEDKTLAFKMNGYISNANYSVKKCIFLLFINHRLVESTSLRKAIETVYAAYLPKNTHPFLYLSLEISPQNVDVNVHPTKHEVHFLHEESILERVQQHIESKLLGSNSSRMYFTQTLLPGLAGPSGEMVKSTTSLTSSSTSGSSDKVYAHQMVRTDSREQKLDAFLQPLSKPLSSQPQAIVTEDKTDISSGRARQQDEEMLELPAPAEVAAKNQSLEGDTTKGTSEMSEKRGPTSSNPRKRHREDSDVEMVEDDSRKEMTAACTPRRRIINLTSVLSLQEEINEQGHEVLREMLHNHSFVGCVNPQWALAQHQTKLYLLNTTKLSEELFYQILIYDFANFGVLRLSEPAPLFDLAMLALDSPESGWTEEDGPKEGLAEYIVEFLKKKAEMLADYFSLEIDEEGNLIGLPLLIDNYVPPLEGLPIFILRLATEVNWDEEKECFESLSKECAMFYSIRKQYISEESTLSGQQSEVPGSIPNSWKWTVEHIVYKALRSHILPPKHFTEDGNILQLANLPDLYKVFEWC

SEQ ID NO: 271 - protein, 756 aa, Homo sapiens
MSFVAGVIRRLDETVVNRIAAGEVIQRPANAIKEMIENCLDAKSTSIQVIVKEGGLKLIQIQDNGTGIRKEDLDIVCERFTTSKLQSFEDLAGISTYGFRGEALASISHVAHVTITTKTADGKCAYRASYSDGKLKAPPKPCAGNQGTQITVEDLFYNIATRRKALKNPSEEYGKILEVVGRYSVHNAGISFSVKKQGETVADVRTLPNASTVDNIRSVFGNAVSRELIEIGCEDKTLAFKMNGYISNANYSVKKCIFLLFINHRLVESTSLRKAIETVYAAYLPKNTHPFLYLSLEISPQNVDVNVHPTKHEVHFLHEESILERVQQHIESKLLGSNSSRMYFTQTLLPGLAGPSGEMVKSTTSLTSSSTSGSSDKVYAHQMVRTDSREQKLDAFLQPLSKPLSSQPQAIVTEDKTDISSGRARQQDEEMLELPAPAEVAAKNQSLEGDTTKGTSEMSEKRGPTSSNPRKRHREDSDVEMVEDDSRKEMTAACTPRRRIINLTSVLSLQEEINEQGHEVLREMLHNHSFVGCVNPQWALAQHQTKLYLLNTTKLSEELFYQILIYDFANFGVLRLSEPAPLFDLAMLALDSPESGWTEEDGPKEGLAEYIVEFLKKKAEMLADYFSLEIDEEGNLIGLPLLIDNYVPPLEGLPIFILRLATEVNWDEEKECFESLSKECAMFYSIRKQYISEESTLSGQQSEVPGSIPNSWKWTVEHIVYKALRSHILPPKHFTEDGNILQLANLPDLYKVFERC

SEQ ID NO: 272 - protein, 756 aa, Homo sapiens
MSFVAGVIRRLDETVVNRIAAGEVIQRPANAIKEMIENCLDAKSTSIQVIVKEGGLKLIQIQDNGTGIRKEDLDIVCERFTTSKLQSFEDLASISTYGFRGEALASISHVAHVTITTKTADGKCAYRASYSDGKLKAPPKPCAGNQGTQITVEDLFYNIATRRKALKNPSEEYGKILEVVGRYSVHNAGISFSVKKQGETVADVRTLPNASTVDNIRSLFGNAVSRELIEIGCEDKTLAFKMNGYISNANYSVKKCIFLLFINHRLVESTSLRKAIETVYAAYLPKNTHPFLYLSLEISPQNVDVNVHPTKHEVHFLHEESILERVQQHIESKLLGSNSSRMYFTQTLLPGLAGPSGEMVKSTTSLTSSSTSGSSDKVYAHQMVRTDSREQKLDAFLQPLSKPLSSQPQAIVTEDKTDISSGRARQQDEEMLELPAPAEVAAKNQSLEGDTTKGTSEMSEKRGPTSSNPRKRHREDSDVEMVEDDSRKEMTAACTPRRRIINLTSVLSLQEEINEQGHEVLREMLHNHSFVGCVNPQWALAQHQTKLYLLNTTKLSEELFYQILIYDFANFGVLRLSEPAPLFDLAMLALDSPESGWTEEDGPKEGLAEYIVEFLKKKAEMLADYFSLEIDEEGNLIGLPLLIDNYVPPLEGLPIFILRLATEVNWDEEKECFESLSKECAMFYSIRKQYISEESTLSGQQSEVPGSIPNSWKWTVEHIVYKALRSHILPPKHFTEDGNILQLANLPDLYKVFERC

SEQ ID NO: 273 - protein, 756 aa, Homo sapiens
MSFVAGVIRRLDETVVNRIAAGEVIQRPANAIKEMIENCLDAKSTSIQVIVKEGGLKLIQIQDNGTGIRKEDLDIVCERFTTSKLQSFEDLASISTYGFRGEALASISHVAHVTITTKTADGKCAYRASYSDGKLKAPPKPCAGNQGTQITVEDLFYNIATRRKALKNPSEEYGKILEVVGRYSVHNAGISFSVKKQGETVADVRTLPNASTVDNIRSVFGNAVSRELIEIGCEDKTLAFKMNGYISNANYSVKKCIFLLFINHRLVESTSLRKAIETVYAAYLPKNTHPFLYLSLEISPQNVDVNVHPTKHEVHFLHEESILERVQQHIESKLLGSNSSRMYFTQTLLPGLAGPSGEMVKSTTSLTSSSTSGSSDKVYAHQMVRTDSREQKLDAFLQPLSKPLSSQPQAIVTEDKTDISSGRARQQDEEMLELPAPAEVAAKNQSLEGDTTKGTSEMSEKRGPTSSNPRKRHREDSDVEMVEDDSRKEMTAACTPRRRIINLTSVLSLQEEINEQGHEVLREMLHNHSFVGCVNPQWALAQHQTKLYLLNTTKLSEELFYQILIYDFANFGVLRLSEPAPLFDLAMLALDSPESGWTEEDGPKEGLAEYIVEFLKKKAEMLADYFSLEIDEEGNLIGLPLLIDNYVPPLEGLPIFILRLATDVNWDEEKECFESLSKECAMFYSIRKQYISEESTLSGQQSEVPGSIPNSWKWTVEHIVYKALRSHILPPKHFTEDGNILQLANLPDLYKVFERC

SEQ ID NO: 274 - protein, 756 aa, Homo sapiens
MSFVAGVIRRLDETVVNRIAAGEVIQRPANAIKEMIENCLDAKSTSIQVIVKEGGLKLIQIQDNGTGIRKEDLDIVCERFTTSKLQSFEDLASISTYGFRGEALASISHVAHVTITTKTADGKCAYRASYSDGKLKAPPKPCAGNQGTQITVEDLFYNIATRRKALKNPSEEYGKILEVVGRYSVHNAGISFSVKKQGETVADVRTLPNASTVDNIRSVFGNAVSRELIEIGCEDKTLAFKMNGYISNANYSVKKCIFLLFINHRLVESTSLRKAIETVYAAYLPKNTHPFLYLSLEISPQNVDVNVHPTKHEVHFLHEESILERVQQHIESKLLGSNSSRMYFTQTLLPGLAGPSGEMVKSTTSLTSSSTSGSSDKVYAHQMVRTDSREQKLDAFLQPLSKPLSSQPQAIVTEDKTDISSGRARQQDEEMLELPAPAEVAAKNQSLEGDTTKGTSEMSEKRGPTSSNPRKRHREDSDVEMVEDDSRKEMTAACTPRRRIINLTSVLSLQEEINEQGHEVLREMLHNHSFVGCVNPQWALAQHQTKLYLLNTTKLSEELFYQILIYDFANFGVLRLSEPAPLFDLAMLALDSPESGWTEEDGPKEGLAEYIVEFLKKKAEMLADYFSLEIDEEGNLIGLPLLIDNYVPPLEGLPIFILRLATEVNWDEEKECFESLSKECAMFYSIRKQYISEESTLSGQQSEVPGSIPNSWKWTVEYIVYKALRSHILPPKHFTEDGNILQLANLPDLYKVFERC

SEQ ID NO: 275 - protein, 756 aa, Homo sapiens
MSFVAGVIRRLDETVVNRIAAGEVIQRPANAIKEMIENCLDAKSTSIQVIVKEGGLKLIQIQDNGTGIRKEDLDIVCERFTTSKLQSFEDLASISTYGFRGEALASISHVAHVTITTKTADGKCAYRASYSDGKLKAPPKPCAGNQGTQITVEDLFYNIATRRKALKNPSEEYGKILEVVGRYSVHNAGISFSVKKQGETVADVRTLPNASTVDNIRSVFGNAVSRELIEIGCEDKTLAFKMNGYISNANYSVKKCIFLLFINHRLVESTSLRKAIETVYAAYLPKNTHPFLYLSLEISPQNVDVNVHPTKHEVHFLHEESILERVQQHIESKLLGSNSSRMYFTQTLLPGLAGPSGEMVKSTTSLTSSSTSGSSDKVYAHQMVRTDSREQKLDAFLQPLSKPLSSQPQAIVTEDKTDISSGRARQQDEEMLELPAPAEVAAKNQSLEGDTTKGTSEMSEKRGPTSSNPRKRHREDSDVEMVEDDSRKEMTAACTPRRRIINLTSVLSLQEEINEQGHEVLREMLHNHSFVGCVNPQWALAQHQTKLYLLNTTKLSEELFYQILIYDFANFGVLRLSEPAPLFDLAMLALDSPESGWTEEDGPKEGLAEYIVEFLKKKAEMLADYFSLEIDEEGNLIGLPLLIDNYVPPLEGLPIFILRLATEVNWDEEKECFESLSKECAMFYSIRKQYISEESTLSGQQSEVPGSIPNSWKWTVEHIVYKALRSHIVPPKHFTEDGNILQLANLPDLYKVFERC

SEQ ID NO: 276 - protein, 756 aa, Homo sapiens
MSFVAGVIRRLDETVVNRIAAGEVIQRPANAIKEMIENCLDAKSTSIQVIVKEGGLKLIQIQDNGTGIRKEDLDIVCERFTTSKLQSFEDLASISTYGFRGEALASISHVAHVTITTKTADGKCAYRASYSDGKLKAPPKPCAGNQGTQITVEDLFYNIATRRKALKNPSEEYGKILEVVGRYSVHNAGISFSVKKQGETVADVRTLPNASTVDNIRSVFGNAVSRELIEIGCEDKTLAFKMNGYISNANYSVKKCIFLLFINHRLVESTSLRKAIETVYAAYLPKNTHPFLYLSLEISPQNVDVNVHPTKHEVHFLHEESILERVQQHIESKLLGSNSSRMYFTQTLLPGLAGPSGEMVKSTTSLTSSSTSGSSDKVYAHQMVRTDSREQKLDAFLQPLSKPLSSQPQAIVTEDKTDISSGRARQQDEEMLELPAPAEVAAKNQSLEGDTTKGTSEMSEKRGPTSSNPRKRHREDSDVEMVEDDSRKEMTAACTPRRRIINLTSVLSLQEEINEQGHEVLREMLHNHSFVGCVNPQWALAQHQTKLYLLNTTKLSEELFYQILIYDFANFGVLRLSEPAPLFDLAMLALDSPESGWTEEDGPKEGLAEYIVEFLKKKAEMLADYFSLEIDEEGNLIGLPLLIDNYVPPLEGLPIFILRLATEVNWDEEKECFESLSKECAMFYSIRKQYISEESTLSGQQSEVPGSIPNSWKWTVEHIVYKALRSHILPPKHFTEDGNILQLANLPDLYRVFERC

SEQ ID NO: 277 - protein, 934 aa, Homo sapiens [sequence omitted]

SEQ ID NO: 278 - protein, 756 aa, Homo sapiens
MSFVAGVIRRHDETVVNRIAAGEVIQRPANAIKEMIENCLDAKSTSIQVIVKEGGLKLIQIQDNGTGIRKEDLDIVCERFTTSKLQSFEDLASISTYGFRGEALASISHVAHVTITTKTADGKCAYRASYSDGKLKAPPKPCAGNQGTQITVEDLFYNIATRRKALKNPSEEYGKILEVVGRYSVHNAGISFSVKKQGETVADVRTLPNASTVDNIRSVFGNAVSRELIEIGCEDKTLAFKMNGYISNANYSVKKCIFLLFINHRLVESTSLRKAIETVYAAYLPKNTHPFLYLSLEISPQNVDVNVHPTKHEVHFLHEESILERVQQHIESKLLGSNSSRMYFTQTLLPGLAGPSGEMVKSTTSLTSSSTSGSSDKVYAHQMVRTDSREQKLDAFLQPLSKPLSSQPQAIVTEDKTDISSGRARQQDEEMLELPAPAEVAAKNQSLEGDTTKGTSEMSEKRGPTSSNPRKRHREDSDVEMVEDDSRKEMTAACTPRRRIINLTSVLSLQEEINEQGHEVLREMLHNHSFVGCVNPQWALAQHQTKLYLLNTTKLSEELFYQILIYDFANFGVLRLSEPAPLFDLAMLALDSPESGWTEEDGPKEGLAEYIVEFLKKKAEMLADYFSLEIDEEGNLIGLPLLIDNYVPPLEGLPIFILRLATEVNWDEEKECFESLSKECAMFYSIRKQYISEESTLSGQQSEVPGSIPNSWKWTVEHIVYKALRSHILPPKHFTEDGNILQLANLPDLYKVFERC

SEQ ID NO: 279 - protein, 756 aa, Homo sapiens
MSFVAGVIRRLDETVVNRFAAGEVIQRPANAIKEMIENCLDAKSTSIQVIVKEGGLKLIQIQDNGTGIRKEDLDIVCERFTTSKLQSFEDLASISTYGFRGEALASISHVAHVTITTKTADGKCAYRASYSDGKLKAPPKPCAGNQGTQITVEDLFYNIATRRKALKNPSEEYGKILEVVGRYSVHNAGISFSVKKQGETVADVRTLPNASTVDNIRSVFGNAVSRELIEIGCEDKTLAFKMNGYISNANYSVKKCIFLLFINHRLVESTSLRKAIETVYAAYLPKNTHPFLYLSLEISPQNVDVNVHPTKHEVHFLHEESILERVQQHIESKLLGSNSSRMYFTQTLLPGLAGPSGEMVKSTTSLTSSSTSGSSDKVYAHQMVRTDSREQKLDAFLQPLSKPLSSQPQAIVTEDKTDISSGRARQQDEEMLELPAPAEVAAKNQSLEGDTTKGTSEMSEKRGPTSSNPRKRHREDSDVEMVEDDSRKEMTAACTPRRRIINLTSVLSLQEEINEQGHEVLREMLHNHSFVGCVNPQWALAQHQTKLYLLNTTKLSEELFYQILIYDFANFGVLRLSEPAPLFDLAMLALDSPESGWTEEDGPKEGLAEYIVEFLKKKAEMLADYFSLEIDEEGNLIGLPLLIDNYVPPLEGLPIFILRLATEVNWDEEKECFESLSKECAMFYSIRKQYISEESTLSGQQSEVPGSIPNSWKWTVEHIVYKALRSHILPPKHFTEDGNILQLANLPDLYKVFERC

SEQ ID NO: 280 - protein, 756 aa, Homo sapiens
MSFVAGVIRRLDETVVNRIAAGEVIQRPANAINEMIENCLDAKSTSIQVIVKEGGLKLIQIQDNGTGIRKEDLDIVCERFTTSKLQSFEDLASISTYGFRGEALASISHVAHVTITTKTADGKCAYRASYSDGKLKAPPKPCAGNQGTQITVEDLFYNIATRRKALKNPSEEYGKILEVVGRYSVHNAGISFSVKKQGETVADVRTLPNASTVDNIRSVFGNAVSRELIEIGCEDKTLAFKMNGYISNANYSVKKCIFLLFINHRLVESTSLRKAIETVYAAYLPKNTHPFLYLSLEISPQNVDVNVHPTKHEVHFLHEESILERVQQHIESKLLGSNSSRMYFTQTLLPGLAGPSGEMVKSTTSLTSSSTSGSSDKVYAHQMVRTDSREQKLDAFLQPLSKPLSSQPQAIVTEDKTDISSGRARQQDEEMLELPAPAEVAAKNQSLEGDTTKGTSEMSEKRGPTSSNPRKRHREDSDVEMVEDDSRKEMTAACTPRRRIINLTSVLSLQEEINEQGHEVLREMLHNHSFVGCVNPQWALAQHQTKLYLLNTTKLSEELFYQILIYDFANFGVLRLSEPAPLFDLAMLALDSPESGWTEEDGPKEGLAEYIVEFLKKKAEMLADYFSLEIDEEGNLIGLPLLIDNYVPPLEGLPIFILRLATEVNWDEEKECFESLSKECAMFYSIRKQYISEESTLSGQQSEVPGSIPNSWKWTVEHIVYKALRSHILPPKHFTEDGNILQLANLPDLYKVFERC

SEQ ID NO: 281 - protein, 756 aa, Homo sapiens
MSFVAGVIRRLDETVVNRIAAGEVIQRPANAIKEMIEDCLDAKSTSIQVIVKEGGLKLIQIQDNGTGIRKEDLDIVCERFTTSKLQSFEDLASISTYGFRGEALASISHVAHVTITTKTADGKCAYRASYSDGKLKAPPKPCAGNQGTQITVEDLFYNIATRRKALKNPSEEYGKILEVVGRYSVHNAGISFSVKKQGETVADVRTLPNASTVDNIRSVFGNAVSRELIEIGCEDKTLAFKMNGYISNANYSVKKCIFLLFINHRLVESTSLRKAIETVYAAYLPKNTHPFLYLSLEISPQNVDVNVHPTKHEVHFLHEESILERVQQHIESKLLGSNSSRMYFTQTLLPGLAGPSGEMVKSTTSLTSSSTSGSSDKVYAHQMVRTDSREQKLDAFLQPLSKPLSSQPQAIVTEDKTDISSGRARQQDEEMLELPAPAEVAAKNQSLEGDTTKGTSEMSEKRGPTSSNPRKRHREDSDVEMVEDDSRKEMTAACTPRRRIINLTSVLSLQEEINEQGHEVLREMLHNHSFVGCVNPQWALAQHQTKLYLLNTTKLSEELFYQILIYDFANFGVLRLSEPAPLFDLAMLALDSPESGWTEEDGPKEGLAEYIVEFLKKKAEMLADYFSLEIDEEGNLIGLPLLIDNYVPPLEGLPIFILRLATEVNWDEEKECFESLSKECAMFYSIRKQYISEESTLSGQQSEVPGSIPNSWKWTVEHIVYKALRSHILPPKHFTEDGNILQLANLPDLYKVFERC

SEQ ID NO: 282 - protein, 756 aa, Homo sapiens
MSFVAGVIRRLDETVVNRIAAGEVIQRPANAIKEMIESCLDAKSTSIQVIVKEGGLKLIQIQDNGTGIRKEDLDIVCERFTTSKLQSFEDLASISTYGFRGEALASISHVAHVTITTKTADGKCAYRASYSDGKLKAPPKPCAGNQGTQITVEDLFYNIATRRKALKNPSEEYGKILEVVGRYSVHNAGISFSVKKQGETVADVRTLPNASTVDNIRSVFGNAVSRELIEIGCEDKTLAFKMNGYISNANYSVKKCIFLLFINHRLVESTSLRKAIETVYAAYLPKNTHPFLYLSLEISPQNVDVNVHPTKHEVHFLHEESILERVQQHIESKLLGSNSSRMYFTQTLLPGLAGPSGEMVKSTTSLTSSSTSGSSDKVYAHQMVRTDSREQKLDAFLQPLSKPLSSQPQAIVTEDKTDISSGRARQQDEEMLELPAPAEVAAKNQSLEGDTTKGTSEMSEKRGPTSSNPRKRHREDSDVEMVEDDSRKEMTAACTPRRRIINLTSVLSLQEEINEQGHEVLREMLHNHSFVGCVNPQWALAQHQTKLYLLNTTKLSEELFYQILIYDFANFGVLRLSEPAPLFDLAMLALDSPESGWTEEDGPKEGLAEYIVEFLKKKAEMLADYFSLEIDEEGNLIGLPLLIDNYVPPLEGLPIFILRLATEVNWDEEKECFESLSKECAMFYSIRKQYISEESTLSGQQSEVPGSIPNSWKWTVEHIVYKALRSHILPPKHFTEDGNILQLANLPDLYKVFERC

SEQ ID NO: 283 - protein, 756 aa, Homo sapiens
MSFVAGVIRRLDETVVNRIAAGEVIQRPANAIKEMIENCTDAKSTSIQVIVKEGGLKLIQIQDNGTGIRKEDLDIVCERFTTSKLQSFEDLASISTYGFRGEALASISHVAHVTITTKTADGKCAYRASYSDGKLKAPPKPCAGNQGTQITVEDLFYNIATRRKALKNPSEEYGKILEVVGRYSVHNAGISFSVKKQGETVADVRTLPNASTVDNIRSVFGNAVSRELIEIGCEDKTLAFKMNGYISNANYSVKKCIFLLFINHRLVESTSLRKAIETVYAAYLPKNTHPFLYLSLEISPQNVDVNVHPTKHEVHFLHEESILERVQQHIESKLLGSNSSRMYFTQTLLPGLAGPSGEMVKSTTSLTSSSTSGSSDKVYAHQMVRTDSREQKLDAFLQPLSKPLSSQPQAIVTEDKTDISSGRARQQDEEMLELPAPAEVAAKNQSLEGDTTKGTSEMSEKRGPTSSNPRKRHREDSDVEMVEDDSRKEMTAACTPRRRIINLTSVLSLQEEINEQGHEVLREMLHNHSFVGCVNPQWALAQHQTKLYLLNTTKLSEELFYQILIYDFANFGVLRLSEPAPLFDLAMLALDSPESGWTEEDGPKEGLAEYIVEFLKKKAEMLADYFSLEIDEEGNLIGLPLLIDNYVPPLEGLPIFILRLATEVNWDEEKECFESLSKECAMFYSIRKQYISEESTLSGQQSEVPGSIPNSWKWTVEHIVYKALRSHILPPKHFTEDGNILQLANLPDLYKVFERC

SEQ ID NO: 284 - protein, 756 aa, Homo sapiens
MSFVAGVIRRLDETVVNRIAAGEVIQRPANAIKEMIENCLGAKSTSIQVIVKEGGLKLIQIQDNGTGIRKEDLDIVCERFTTSKLQSFEDLASISTYGFRGEALASISHVAHVTITTKTADGKCAYRASYSDGKLKAPPKPCAGNQGTQITVEDLFYNIATRRKALKNPSEEYGKILEVVGRYSVHNAGISFSVKKQGETVADVRTLPNASTVDNIRSVFGNAVSRELIEIGCEDKTLAFKMNGYISNANYSVKKCIFLLFINHRLVESTSLRKAIETVYAAYLPKNTHPFLYLSLEISPQNVDVNVHPTKHEVHFLHEESILERVQQHIESKLLGSNSSRMYFTQTLLPGLAGPSGEMVKSTTSLTSSSTSGSSDKVYAHQMVRTDSREQKLDAFLQPLSKPLSSQPQAIVTEDKTDISSGRARQQDEEMLELPAPAEVAAKNQSLEGDTTKGTSEMSEKRGPTSSNPRKRHREDSDVEMVEDDSRKEMTAACTPRRRIINLTSVLSLQEEINEQGHEVLREMLHNHSFVGCVNPQWALAQHQTKLYLLNTTKLSEELFYQILIYDFANFGVLRLSEPAPLFDLAMLALDSPESGWTEEDGPKEGLAEYIVEFLKKKAEMLADYFSLEIDEEGNLIGLPLLIDNYVPPLEGLPIFILRLATEVNWDEEKECFESLSKECAMFYSIRKQYISEESTLSGQQSEVPGSIPNSWKWTVEHIVYKALRSHILPPKHFTEDGNILQLANLPDLYKVFERC

SEQ ID NO: 285 - protein, 756 aa, Homo sapiens
MSFVAGVIRRLDETVVNRIAAGEVIQRPANAIKEMIENCLDAKSISIQVIVKEGGLKLIQIQDNGTGIRKEDLDIVCERFTTSKLQSFEDLASISTYGFRGEALASISHVAHVTITTKTADGKCAYRASYSDGKLKAPPKPCAGNQGTQITVEDLFYNIATRRKALKNPSEEYGKILEVVGRYSVHNAGISFSVKKQGETVADVRTLPNASTVDNIRSVFGNAVSRELIEIGCEDKTLAFKMNGYISNANYSVKKCIFLLFINHRLVESTSLRKAIETVYAAYLPKNTHPFLYLSLEISPQNVDVNVHPTKHEVHFLHEESILERVQQHIESKLLGSNSSRMYFTQTLLPGLAGPSGEMVKSTTSLTSSSTSGSSDKVYAHQMVRTDSREQKLDAFLQPLSKPLSSQPQAIVTEDKTDISSGRARQQDEEMLELPAPAEVAAKNQSLEGDTTKGTSEMSEKRGPTSSNPRKRHREDSDVEMVEDDSRKEMTAACTPRRRIINLTSVLSLQEEINEQGHEVLREMLHNHSFVGCVNPQWALAQHQTKLYLLNTTKLSEELFYQILIYDFANFGVLRLSEPAPLFDLAMLALDSPESGWTEEDGPKEGLAEYIVEFLKKKAEMLADYFSLEIDEEGNLIGLPLLIDNYVPPLEGLPIFILRLATEVNWDEEKECFESLSKECAMFYSIRKQYISEESTLSGQQSEVPGSIPNSWKWTVEHIVYKALRSHILPPKHFTEDGNILQLANLPDLYKVFERC

SEQ ID NO: 286 - protein, 756 aa, Homo sapiens
MSFVAGVIRRLDETVVNRIAAGEVIQRPANAIKEMIENCLDAKSTSIQAIVKEGGLKLIQIQDNGTGIRKEDLDIVCERFTTSKLQSFEDLASISTYGFRGEALASISHVAHVTITTKTADGKCAYRASYSDGKLKAPPKPCAGNQGTQITVEDLFYNIATRRKALKNPSEEYGKILEVVGRYSVHNAGISFSVKKQGETVADVRTLPNASTVDNIRSVFGNAVSRELIEIGCEDKTLAFKMNGYISNANYSVKKCIFLLFINHRLVESTSLRKAIETVYAAYLPKNTHPFLYLSLEISPQNVDVNVHPTKHEVHFLHEESILERVQQHIESKLLGSNSSRMYFTQTLLPGLAGPSGEMVKSTTSLTSSSTSGSSDKVYAHQMVRTDSREQKLDAFLQPLSKPLSSQPQAIVTEDKTDISSGRARQQDEEMLELPAPAEVAAKNQSLEGDTTKGTSEMSEKRGPTSSNPRKRHREDSDVEMVEDDSRKEMTAACTPRRRIINLTSVLSLQEEINEQGHEVLREMLHNHSFVGCVNPQWALAQHQTKLYLLNTTKLSEELFYQILIYDFANFGVLRLSEPAPLFDLAMLALDSPESGWTEEDGPKEGLAEYIVEFLKKKAEMLADYFSLEIDEEGNLIGLPLLIDNYVPPLEGLPIFILRLATEVNWDEEKECFESLSKECAMFYSIRKQYISEESTLSGQQSEVPGSIPNSWKWTVEHIVYKALRSHILPPKHFTEDGNILQLANLPDLYKVFERC

SEQ ID NO: 287 - protein, 756 aa, Homo sapiens
MSFVAGVIRRLDETVVNRIAAGEVIQRPANAIKEMIENCLDAKSTSIQVIVIEGGLKLIQIQDNGTGIRKEDLDIVCERFTTSKLQSFEDLASISTYGFRGEALASISHVAHVTITTKTADGKCAYRASYSDGKLKAPPKPCAGNQGTQITVEDLFYNIATRRKALKNPSEEYGKILEVVGRYSVHNAGISFSVKKQGETVADVRTLPNASTVDNIRSVFGNAVSRELIEIGCEDKTLAFKMNGYISNANYSVKKCIFLLFINHRLVESTSLRKAIETVYAAYLPKNTHPFLYLSLEISPQNVDVNVHPTKHEVHFLHEESILERVQQHIESKLLGSNSSRMYFTQTLLPGLAGPSGEMVKSTTSLTSSSTSGSSDKVYAHQMVRTDSREQKLDAFLQPLSKPLSSQPQAIVTEDKTDISSGRARQQDEEMLELPAPAEVAAKNQSLEGDTTKGTSEMSEKRGPTSSNPRKRHREDSDVEMVEDDSRKEMTAACTPRRRIINLTSVLSLQEEINEQGHEVLREMLHNHSFVGCVNPQWALAQHQTKLYLLNTTKLSEELFYQILIYDFANFGVLRLSEPAPLFDLAMLALDSPESGWTEEDGPKEGLAEYIVEFLKKKAEMLADYFSLEIDEEGNLIGLPLLIDNYVPPLEGLPIFILRLATEVNWDEEKECFESLSKECAMFYSIRKQYISEESTLSGQQSEVPGSIPNSWKWTVEHIVYKALRSHILPPKHFTEDGNILQLANLPDLYKVFERC

SEQ ID NO: 288 - protein, 756 aa, Homo sapiens
MSFVAGVIRRLDETVVNRIAAGEVIQRPANAIKEMIENCLDAKSTSIQVIVEEGGLKLIQIQDNGTGIRKEDLDIVCERFTTSKLQSFEDLASISTYGFRGEALASISHVAHVTITTKTADGKCAYRASYSDGKLKAPPKPCAGNQGTQITVEDLFYNIATRRKALKNPSEEYGKILEVVGRYSVHNAGISFSVKKQGETVADVRTLPNASTVDNIRSVFGNAVSRELIEIGCEDKTLAFKMNGYISNANYSVKKCIFLLFINHRLVESTSLRKAIETVYAAYLPKNTHPFLYLSLEISPQNVDVNVHPTKHEVHFLHEESILERVQQHIESKLLGSNSSRMYFTQTLLPGLAGPSGEMVKSTTSLTSSSTSGSSDKVYAHQMVRTDSREQKLDAFLQPLSKPLSSQPQAIVTEDKTDISSGRARQQDEEMLELPAPAEVAAKNQSLEGDTTKGTSEMSEKRGPTSSNPRKRHREDSDVEMVEDDSRKEMTAACTPRRRIINLTSVLSLQEEINEQGHEVLREMLHNHSFVGCVNPQWALAQHQTKLYLLNTTKLSEELFYQILIYDFANFGVLRLSEPAPLFDLAMLALDSPESGWTEEDGPKEGLAEYIVEFLKKKAEMLADYFSLEIDEEGNLIGLPLLIDNYVPPLEGLPIFILRLATEVNWDEEKECFESLSKECAMFYSIRKQYISEESTLSGQQSEVPGSIPNSWKWTVEHIVYKALRSHILPPKHFTEDGNILQLANLPDLYKVFERC

SEQ ID NO: 289 - protein, 756 aa, Homo sapiens
MSFVAGVIRRLDETVVNRIAAGEVIQRPANAIKEMIENCLDAKSTSIQVIVKVGGLKLIQIQDNGTGIRKEDLDIVCERFTTSKLQSFEDLASISTYGFRGEALASISHVAHVTITTKTADGKCAYRASYSDGKLKAPPKPCAGNQGTQITVEDLFYNIATRRKALKNPSEEYGKILEVVGRYSVHNAGISFSVKKQGETVADVRTLPNASTVDNIRSVFGNAVSRELIEIGCEDKTLAFKMNGYISNANYSVKKCIFLLFINHRLVESTSLRKAIETVYAAYLPKNTHPFLYLSLEISPQNVDVNVHPTKHEVHFLHEESILERVQQHIESKLLGSNSSRMYFTQTLLPGLAGPSGEMVKSTTSLTSSSTSGSSDKVYAHQMVRTDSREQKLDAFLQPLSKPLSSQPQAIVTEDKTDISSGRARQQDEEMLELPAPAEVAAKNQSLEGDTTKGTSEMSEKRGPTSSNPRKRHREDSDVEMVEDDSRKEMTAACTPRRRIINLTSVLSLQEEINEQGHEVLREMLHNHSFVGCVNPQWALAQHQTKLYLLNTTKLSEELFYQILIYDFANFGVLRLSEPAPLFDLAMLALDSPESGWTEEDGPKEGLAEYIVEFLKKKAEMLADYFSLEIDEEGNLIGLPLLIDNYVPPLEGLPIFILRLATEVNWDEEKECFESLSKECAMFYSIRKQYISEESTLSGQQSEVPGSIPNSWKWTVEHIVYKALRSHILPPKHFTEDGNILQLANLPDLYKVFERC

SEQ ID NO: 290 - protein, 756 aa, Homo sapiens
MSFVAGVIRRLDETVVNRIAAGEVIQRPANAIKEMIENCLDAKSTSIQVIVKERGLKLIQIQDNGTGIRKEDLDIVCERFTTSKLQSFEDLASISTYGFRGEALASISHVAHVTITTKTADGKCAYRASYSDGKLKAPPKPCAGNQGTQITVEDLFYNIATRRKALKNPSEEYGKILEVVGRYSVHNAGISFSVKKQGETVADVRTLPNASTVDNIRSVFGNAVSRELIEIGCEDKTLAFKMNGYISNANYSVKKCIFLLFINHRLVESTSLRKAIETVYAAYLPKNTHPFLYLSLEISPQNVDVNVHPTKHEVHFLHEESILERVQQHIESKLLGSNSSRMYFTQTLLPGLAGPSGEMVKSTTSLTSSSTSGSSDKVYAHQMVRTDSREQKLDAFLQPLSKPLSSQPQAIVTEDKTDISSGRARQQDEEMLELPAPAEVAAKNQSLEGDTTKGTSEMSEKRGPTSSNPRKRHREDSDVEMVEDDSRKEMTAACTPRRRIINLTSVLSLQEEINEQGHEVLREMLHNHSFVGCVNPQWALAQHQTKLYLLNTTKLSEELFYQILIYDFANFGVLRLSEPAPLFDLAMLALDSPESGWTEEDGPKEGLAEYIVEFLKKKAEMLADYFSLEIDEEGNLIGLPLLIDNYVPPLEGLPIFILRLATEVNWDEEKECFESLSKECAMFYSIRKQYISEESTLSGQQSEVPGSIPNSWKWTVEHIVYKALRSHILPPKHFTEDGNILQLANLPDLYKVFERC

SEQ ID NO: 291 - protein, 756 aa, Homo sapiens
MSFVAGVIRRLDETVVNRIAAGEVIQRPANAIKEMIENCLDAKSTSIQVIVKEGRLKLIQIQDNGTGIRKEDLDIVCERFTTSKLQSFEDLASISTYGFRGEALASISHVAHVTITTKTADGKCAYRASYSDGKLKAPPKPCAGNQGTQITVEDLFYNIATRRKALKNPSEEYGKILEVVGRYSVHNAGISFSVKKQGETVADVRTLPNASTVDNIRSVFGNAVSRELIEIGCEDKTLAFKMNGYISNANYSVKKCIFLLFINHRLVESTSLRKAIETVYAAYLPKNTHPFLYLSLEISPQNVDVNVHPTKHEVHFLHEESILERVQQHIESKLLGSNSSRMYFTQTLLPGLAGPSGEMVKSTTSLTSSSTSGSSDKVYAHQMVRTDSREQKLDAFLQPLSKPLSSQPQAIVTEDKTDISSGRARQQDEEMLELPAPAEVAAKNQSLEGDTTKGTSEMSEKRGPTSSNPRKRHREDSDVEMVEDDSRKEMTAACTPRRRIINLTSVLSLQEEINEQGHEVLREMLHNHSFVGCVNPQWALAQHQTKLYLLNTTKLSEELFYQILIYDFANFGVLRLSEPAPLFDLAMLALDSPESGWTEEDGPKEGLAEYIVEFLKKKAEMLADYFSLEIDEEGNLIGLPLLIDNYVPPLEGLPIFILRLATEVNWDEEKECFESLSKECAMFYSIRKQYISEESTLSGQQSEVPGSIPNSWKWTVEHIVYKALRSHILPPKHFTEDGNILQLANLPDLYKVFERC

SEQ ID NO: 292 - protein, 756 aa, Homo sapiens
MSFVAGVIRRLDETVVNRIAAGEVIQRPANAIKEMIENCLDAKSTSIQVIVKEGDLKLIQIQDNGTGIRKEDLDIVCERFTTSKLQSFEDLASISTYGFRGEALASISHVAHVTITTKTADGKCAYRASYSDGKLKAPPKPCAGNQGTQITVEDLFYNIATRRKALKNPSEEYGKILEVVGRYSVHNAGISFSVKKQGETVADVRTLPNASTVDNIRSVFGNAVSRELIEIGCEDKTLAFKMNGYISNANYSVKKCIFLLFINHRLVESTSLRKAIETVYAAYLPKNTHPFLYLSLEISPQNVDVNVHPTKHEVHFLHEESILERVQQHIESKLLGSNSSRMYFTQTLLPGLAGPSGEMVKSTTSLTSSSTSGSSDKVYAHQMVRTDSREQKLDAFLQPLSKPLSSQPQAIVTEDKTDISSGRARQQDEEMLELPAPAEVAAKNQSLEGDTTKGTSEMSEKRGPTSSNPRKRHREDSDVEMVEDDSRKEMTAACTPRRRIINLTSVLSLQEEINEQGHEVLREMLHNHSFVGCVNPQWALAQHQTKLYLLNTTKLSEELFYQILIYDFANFGVLRLSEPAPLFDLAMLALDSPESGWTEEDGPKEGLAEYIVEFLKKKAEMLADYFSLEIDEEGNLIGLPLLIDNYVPPLEGLPIFILRLATEVNWDEEKECFESLSKECAMFYSIRKQYISEESTLSGQQSEVPGSIPNSWKWTVEHIVYKALRSHILPPKHFTEDGNILQLANLPDLYKVFERC

SEQ ID NO: 293 - protein, 756 aa, Homo sapiens
MSFVAGVIRRLDETVVNRIAAGEVIQRPANAIKEMIENCLDAKSTSIQVIVKEGGLELIQIQDNGTGIRKEDLDIVCERFTTSKLQSFEDLASISTYGFRGEALASISHVAHVTITTKTADGKCAYRASYSDGKLKAPPKPCAGNQGTQITVEDLFYNIATRRKALKNPSEEYGKILEVVGRYSVHNAGISFSVKKQGETVADVRTLPNASTVDNIRSVFGNAVSRELIEIGCEDKTLAFKMNGYISNANYSVKKCIFLLFINHRLVESTSLRKAIETVYAAYLPKNTHPFLYLSLEISPQNVDVNVHPTKHEVHFLHEESILERVQQHIESKLLGSNSSRMYFTQTLLPGLAGPSGEMVKSTTSLTSSSTSGSSDKVYAHQMVRTDSREQKLDAFLQPLSKPLSSQPQAIVTEDKTDISSGRARQQDEEMLELPAPAEVAAKNQSLEGDTTKGTSEMSEKRGPTSSNPRKRHREDSDVEMVEDDSRKEMTAACTPRRRIINLTSVLSLQEEINEQGHEVLREMLHNHSFVGCVNPQWALAQHQTKLYLLNTTKLSEELFYQILIYDFANFGVLRLSEPAPLFDLAMLALDSPESGWTEEDGPKEGLAEYIVEFLKKKAEMLADYFSLEIDEEGNLIGLPLLIDNYVPPLEGLPIFILRLATEVNWDEEKECFESLSKECAMFYSIRKQYISEESTLSGQQSEVPGSIPNSWKWTVEHIVYKALRSHILPPKHFTEDGNILQLANLPDLYKVFERC

SEQ ID NO: 294 - protein, 756 aa, Homo sapiens
MSFVAGVIRRLDETVVNRIAAGEVIQRPANAIKEMIENCLDAKSTSIQVIVKEGGLKLIPIQDNGTGIRKEDLDIVCERFTTSKLQSFEDLASISTYGFRGEALASISHVAHVTITTKTADGKCAYRASYSDGKLKAPPKPCAGNQGTQITVEDLFYNIATRRKALKNPSEEYGKILEVVGRYSVHNAGISFSVKKQGETVADVRTLPNASTVDNIRSVFGNAVSRELIEIGCEDKTLAFKMNGYISNANYSVKKCIFLLFINHRLVESTSLRKAIETVYAAYLPKNTHPFLYLSLEISPQNVDVNVHPTKHEVHFLHEESILERVQQHIESKLLGSNSSRMYFTQTLLPGLAGPSGEMVKSTTSLTSSSTSGSSDKVYAHQMVRTDSREQKLDAFLQPLSKPLSSQPQAIVTEDKTDISSGRARQQDEEMLELPAPAEVAAKNQSLEGDTTKGTSEMSEKRGPTSSNPRKRHREDSDVEMVEDDSRKEMTAACTPRRRIINLTSVLSLQEEINEQGHEVLREMLHNHSFVGCVNPQWALAQHQTKLYLLNTTKLSEELFYQILIYDFANFGVLRLSEPAPLFDLAMLALDSPESGWTEEDGPKEGLAEYIVEFLKKKAEMLADYFSLEIDEEGNLIGLPLLIDNYVPPLEGLPIFILRLATEVNWDEEKECFESLSKECAMFYSIRKQYISEESTLSGQQSEVPGSIPNSWKWTVEHIVYKALRSHILPPKHFTEDGNILQLANLPDLYKVFERC

SEQ ID NO: 295 - protein, 756 aa, Homo sapiens
MSFVAGVIRRLDETVVNRIAAGEVIQRPANAIKEMIENCLDAKSTSIQVIVKEGGLKLIQKQDNGTGIRKEDLDIVCERFTTSKLQSFEDLASISTYGFRGEALASISHVAHVTITTKTADGKCAYRASYSDGKLKAPPKPCAGNQGTQITVEDLFYNIATRRKALKNPSEEYGKILEVVGRYSVHNAGISFSVKKQGETVADVRTLPNASTVDNIRSVFGNAVSRELIEIGCEDKTLAFKMNGYISNANYSVKKCIFLLFINHRLVESTSLRKAIETVYAAYLPKNTHPFLYLSLEISPQNVDVNVHPTKHEVHFLHEESILERVQQHIESKLLGSNSSRMYFTQTLLPGLAGPSGEMVKSTTSLTSSSTSGSSDKVYAHQMVRTDSREQKLDAFLQPLSKPLSSQPQAIVTEDKTDISSGRARQQDEEMLELPAPAEVAAKNQSLEGDTTKGTSEMSEKRGPTSSNPRKRHREDSDVEMVEDDSRKEMTAACTPRRRIINLTSVLSLQEEINEQGHEVLREMLHNHSFVGCVNPQWALAQHQTKLYLLNTTKLSEELFYQILIYDFANFGVLRLSEPAPLFDLAMLALDSPESGWTEEDGPKEGLAEYIVEFLKKKAEMLADYFSLEIDEEGNLIGLPLLIDNYVPPLEGLPIFILRLATEVNWDEEKECFESLSKECAMFYSIRKQYISEESTLSGQQSEVPGSIPNSWKWTVEHIVYKALRSHILPPKHFTEDGNILQLANLPDLYKVFERC

SEQ ID NO: 296 - protein, 756 aa, Homo sapiens
MSFVAGVIRRLDETVVNRIAAGEVIQRPANAIKEMIENCLDAKSTSIQVIVKEGGLKLIQIQDNRTGIRKEDLDIVCERFTTSKLQSFEDLASISTYGFRGEALASISHVAHVTITTKTADGKCAYRASYSDGKLKAPPKPCAGNQGTQITVEDLFYNIATRRKALKNPSEEYGKILEVVGRYSVHNAGISFSVKKQGETVADVRTLPNASTVDNIRSVFGNAVSRELIEIGCEDKTLAFKMNGYISNANYSVKKCIFLLFINHRLVESTSLRKAIETVYAAYLPKNTHPFLYLSLEISPQNVDVNVHPTKHEVHFLHEESILERVQQHIESKLLGSNSSRMYFTQTLLPGLAGPSGEMVKSTTSLTSSSTSGSSDKVYAHQMVRTDSREQKLDAFLQPLSKPLSSQPQAIVTEDKTDISSGRARQQDEEMLELPAPAEVAAKNQSLEGDTTKGTSEMSEKRGPTSSNPRKRHREDSDVEMVEDDSRKEMTAACTPRRRIINLTSVLSLQEEINEQGHEVLREMLHNHSFVGCVNPQWALAQHQTKLYLLNTTKLSEELFYQILIYDFANFGVLRLSEPAPLFDLAMLALDSPESGWTEEDGPKEGLAEYIVEFLKKKAEMLADYFSLEIDEEGNLIGLPLLIDNYVPPLEGLPIFILRLATEVNWDEEKECFESLSKECAMFYSIRKQYISEESTLSGQQSEVPGSIPNSWKWTVEHIVYKALRSHILPPKHFTEDGNILQLANLPDLYKVFERC

SEQ ID NO: 297 - protein, 756 aa, Homo sapiens
MSFVAGVIRRLDETVVNRIAAGEVIQRPANAIKEMIENCLDAKSTSIQVIVKEGGLKLIQIQDNGTVIRKEDLDIVCERFTTSKLQSFEDLASISTYGFRGEALASISHVAHVTITTKTADGKCAYRASYSDGKLKAPPKPCAGNQGTQITVEDLFYNIATRRKALKNPSEEYGKILEVVGRYSVHNAGISFSVKKQGETVADVRTLPNASTVDNIRSVFGNAVSRELIEIGCEDKTLAFKMNGYISNANYSVKKCIFLLFINHRLVESTSLRKAIETVYAAYLPKNTHPFLYLSLEISPQNVDVNVHPTKHEVHFLHEESILERVQQHIESKLLGSNSSRMYFTQTLLPGLAGPSGEMVKSTTSLTSSSTSGSSDKVYAHQMVRTDSREQKLDAFLQPLSKPLSSQPQAIVTEDKTDISSGRARQQDEEMLELPAPAEVAAKNQSLEGDTTKGTSEMSEKRGPTSSNPRKRHREDSDVEMVEDDSRKEMTAACTPRRRIINLTSVLSLQEEINEQGHEVLREMLHNHSFVGCVNPQWALAQHQTKLYLLNTTKLSEELFYQILIYDFANFGVLRLSEPAPLFDLAMLALDSPESGWTEEDGPKEGLAEYIVEFLKKKAEMLADYFSLEIDEEGNLIGLPLLIDNYVPPLEGLPIFILRLATEVNWDEEKECFESLSKECAMFYSIRKQYISEESTLSGQQSEVPGSIPNSWKWTVEHIVYKALRSHILPPKHFTEDGNILQLANLPDLYKVFERC

SEQ ID NO: 298 - protein, 756 aa, Homo sapiens
MSFVAGVIRRLDETVVNRIAAGEVIQRPANAIKEMIENCLDAKSTSIQVIVKEGGLKLIQIQDNGTEIRKEDLDIVCERFTTSKLQSFEDLASISTYGFRGEALASISHVAHVTITTKTADGKCAYRASYSDGKLKAPPKPCAGNQGTQITVEDLFYNIATRRKALKNPSEEYGKILEVVGRYSVHNAGISFSVKKQGETVADVRTLPNASTVDNIRSVFGNAVSRELIEIGCEDKTLAFKMNGYISNANYSVKKCIFLLFINHRLVESTSLRKAIETVYAAYLPKNTHPFLYLSLEISPQNVDVNVHPTKHEVHFLHEESILERVQQHIESKLLGSNSSRMYFTQTLLPGLAGPSGEMVKSTTSLTSSSTSGSSDKVYAHQMVRTDSREQKLDAFLQPLSKPLSSQPQAIVTEDKTDISSGRARQQDEEMLELPAPAEVAAKNQSLEGDTTKGTSEMSEKRGPTSSNPRKRHREDSDVEMVEDDSRKEMTAACTPRRRIINLTSVLSLQEEINEQGHEVLREMLHNHSFVGCVNPQWALAQHQTKLYLLNTTKLSEELFYQILIYDFANFGVLRLSEPAPLFDLAMLALDSPESGWTEEDGPKEGLAEYIVEFLKKKAEMLADYFSLEIDEEGNLIGLPLLIDNYVPPLEGLPIFILRLATEVNWDEEKECFESLSKECAMFYSIRKQYISEESTLSGQQSEVPGSIPNSWKWTVEHIVYKALRSHILPPKHFTEDGNILQLANLPDLYKVFERC

SEQ ID NO: 299 - protein, 702 aa, Homo sapiens
MSFVAGVIRRLDETVVNRIAAGEVIQRPANAIKEMIENCLDAKSTSIQVIVKEGGLKLIQIQDNGTGIRKEVLDIVCERFTTSKLQSFEDLASISTYGFRGEALASISHVAHVTITTKTADGKCAYRASYSDGKLKAPPKPCAGNQGTQITVEDLFYNIATRRKALKNPSEEYGKILEVVGRYSVHNAGISFSVKKQGETVADVRTLPNASTVDNIRSVFGNAVSRELIEIGCEDKTLAFKMNGYISNANYSVKKCIFLLFINHRLVESTSLRKAIETVYAAYLPKNTHPFLYLSLEISPQNVDVNVHPTKHEVHFLHEESILERVQQHIESKLLGSNSSRMYFTQTLLPGLAGPSGEMVKSTTSLTSSSTSGSSDKVYAHQMVRTDSREQKLDAFLQPLSKPLSSQPQAIVTEDKTDISSGRARQQDEEMLELPAPAEVAAKNQSLEGDTTKGTSEMSEKRGPTSSNPRKRHREDSDVEMVEDDSRKEMTAACTPRRRIINLTSVLSLQEEINEQGHEVLREMLHNHSFVGCVNPQWALAQHQTKLYLLNTTKLSEELFYQILIYDFANFGVLRLSEPAPLFDLAMLALDSPESGWTEEDGPKEGLAEYIVEFLKKKAEMLADYFSLEIDEEGNLIGLPLLIDNYVPPLEGLPIFILRLATEVNWDEEKECFESLSKECAMFYSIRKQYISEESTLSGQQS

SEQ ID NO: 300 - protein, 756 aa, Homo sapiens
MSFVAGVIRRLDETVVNRIAAGEVIQRPANAIKEMIENCLDAKSTSIQVIVKEGGLKLIQIQDNGTGIRKEDQDIVCERFTTSKLQSFEDLASISTYGFRGEALASISHVAHVTITTKTADGKCAYRASYSDGKLKAPPKPCAGNQGTQITVEDLFYNIATRRKALKNPSEEYGKILEVVGRYSVHNAGISFSVKKQGETVADVRTLPNASTVDNIRSVFGNAVSRELIEIGCEDKTLAFKMNGYISNANYSVKKCIFLLFINHRLVESTSLRKAIETVYAAYLPKNTHPFLYLSLEISPQNVDVNVHPTKHEVHFLHEESILERVQQHIESKLLGSNSSRMYFTQTLLPGLAGPSGEMVKSTTSLTSSSTSGSSDKVYAHQMVRTDSREQKLDAFLQPLSKPLSSQPQAIVTEDKTDISSGRARQQDEEMLELPAPAEVAAKNQSLEGDTTKGTSEMSEKRGPTSSNPRKRHREDSDVEMVEDDSRKEMTAACTPRRRIINLTSVLSLQEEINEQGHEVLREMLHNHSFVGCVNPQWALAQHQTKLYLLNTTKLSEELFYQILIYDFANFGVLRLSEPAPLFDLAMLALDSPESGWTEEDGPKEGLAEYIVEFLKKKAEMLADYFSLEIDEEGNLIGLPLLIDNYVPPLEGLPIFILRLATEVNWDEEKECFESLSKECAMFYSIRKQYISEESTLSGQQSEVPGSIPNSWKWTVEHIVYKALRSHILPPKHFTEDGNILQLANLPDLYKVFERC

SEQ ID NO: 301 - protein, 756 aa, Homo sapiens
MSFVAGVIRRLDETVVNRIAAGEVIQRPANAIKEMIENCLDAKSTSIQVIVKEGGLKLIQIQDNGTGIRKEDLDIVRERFTTSKLQSFEDLASISTYGFRGEALASISHVAHVTITTKTADGKCAYRASYSDGKLKAPPKPCAGNQGTQITVEDLFYNIATRRKALKNPSEEYGKILEVVGRYSVHNAGISFSVKKQGETVADVRTLPNASTVDNIRSVFGNAVSRELIEIGCEDKTLAFKMNGYISNANYSVKKCIFLLFINHRLVESTSLRKAIETVYAAYLPKNTHPFLYLSLEISPQNVDVNVHPTKHEVHFLHEESILERVQQHIESKLLGSNSSRMYFTQTLLPGLAGPSGEMVKSTTSLTSSSTSGSSDKVYAHQMVRTDSREQKLDAFLQPLSKPLSSQPQAIVTEDKTDISSGRARQQDEEMLELPAPAEVAAKNQSLEGDTTKGTSEMSEKRGPTSSNPRKRHREDSDVEMVEDDSRKEMTAACTPRRRIINLTSVLSLQEEINEQGHEVLREMLHNHSFVGCVNPQWALAQHQTKLYLLNTTKLSEELFYQILIYDFANFGVLRLSEPAPLFDLAMLALDSPESGWTEEDGPKEGLAEYIVEFLKKKAEMLADYFSLEIDEEGNLIGLPLLIDNYVPPLEGLPIFILRLATEVNWDEEKECFESLSKECAMFYSIRKQYISEESTLSGQQSEVPGSIPNSWKWTVEHIVYKALRSHILPPKHFTEDGNILQLANLPDLYKVFERC

SEQ ID NO: 302 - protein, 756 aa, Homo sapiens
MSFVAGVIRRLDETVVNRIAAGEVIQRPANAIKEMIENCLDAKSTSIQVIVKEGGLKLIQIQDNGTGIRKEDLDIVGERFTTSKLQSFEDLASISTYGFRGEALASISHVAHVTITTKTADGKCAYRASYSDGKLKAPPKPCAGNQGTQITVEDLFYNIATRRKALKNPSEEYGKILEVVGRYSVHNAGISFSVKKQGETVADVRTLPNASTVDNIRSVFGNAVSRELIEIGCEDKTLAFKMNGYISNANYSVKKCIFLLFINHRLVESTSLRKAIETVYAAYLPKNTHPFLYLSLEISPQNVDVNVHPTKHEVHFLHEESILERVQQHIESKLLGSNSSRMYFTQTLLPGLAGPSGEMVKSTTSLTSSSTSGSSDKVYAHQMVRTDSREQKLDAFLQPLSKPLSSQPQAIVTEDKTDISSGRARQQDEEMLELPAPAEVAAKNQSLEGDTTKGTSEMSEKRGPTSSNPRKRHREDSDVEMVEDDSRKEMTAACTPRRRIINLTSVLSLQEEINEQGHEVLREMLHNHSFVGCVNPQWALAQHQTKLYLLNTTKLSEELFYQILIYDFANFGVLRLSEPAPLFDLAMLALDSPESGWTEEDGPKEGLAEYIVEFLKKKAEMLADYFSLEIDEEGNLIGLPLLIDNYVPPLEGLPIFILRLATEVNWDEEKECFESLSKECAMFYSIRKQYISEESTLSGQQSEVPGSIPNSWKWTVEHIVYKALRSHILPPKHFTEDGNILQLANLPDLYKVFERC

SEQ ID NO: 303 - protein, 756 aa, Homo sapiens
MSFVAGVIRRLDETVVNRIAAGEVIQRPANAIKEMIENCLDAKSTSIQVIVKEGGLKLIQIQDNGTGIRKEDLDIVCVRFTTSKLQSFEDLASISTYGFRGEALASISHVAHVTITTKTADGKCAYRASYSDGKLKAPPKPCAGNQGTQITVEDLFYNIATRRKALKNPSEEYGKILEVVGRYSVHNAGISFSVKKQGETVADVRTLPNASTVDNIRSVFGNAVSRELIEIGCEDKTLAFKMNGYISNANYSVKKCIFLLFINHRLVESTSLRKAIETVYAAYLPKNTHPFLYLSLEISPQNVDVNVHPTKHEVHFLHEESILERVQQHIESKLLGSNSSRMYFTQTLLPGLAGPSGEMVKSTTSLTSSSTSGSSDKVYAHQMVRTDSREQKLDAFLQPLSKPLSSQPQAIVTEDKTDISSGRARQQDEEMLELPAPAEVAAKNQSLEGDTTKGTSEMSEKRGPTSSNPRKRHREDSDVEMVEDDSRKEMTAACTPRRRIINLTSVLSLQEEINEQGHEVLREMLHNHSFVGCVNPQWALAQHQTKLYLLNTTKLSEELFYQILIYDFANFGVLRLSEPAPLFDLAMLALDSPESGWTEEDGPKEGLAEYIVEFLKKKAEMLADYFSLEIDEEGNLIGLPLLIDNYVPPLEGLPIFILRLATEVNWDEEKECFESLSKECAMFYSIRKQYISEESTLSGQQSEVPGSIPNSWKWTVEHIVYKALRSHILPPKHFTEDGNILQLANLPDLYKVFERC

SEQ ID NO: 304 - protein, 756 aa, Homo sapiens
MSFVAGVIRRLDETVVNRIAAGEVIQRPANAIKEMIENCLDAKSTSIQVIVKEGGLKLIQIQDNGTGIRKEDLDIVCERLTTSKLQSFEDLASISTYGFRGEALASISHVAHVTITTKTADGKCAYRASYSDGKLKAPPKPCAGNQGTQITVEDLFYNIATRRKALKNPSEEYGKILEVVGRYSVHNAGISFSVKKQGETVADVRTLPNASTVDNIRSVFGNAVSRELIEIGCEDKTLAFKMNGYISNANYSVKKCIFLLFINHRLVESTSLRKAIETVYAAYLPKNTHPFLYLSLEISPQNVDVNVHPTKHEVHFLHEESILERVQQHIESKLLGSNSSRMYFTQTLLPGLAGPSGEMVKSTTSLTSSSTSGSSDKVYAHQMVRTDSREQKLDAFLQPLSKPLSSQPQAIVTEDKTDISSGRARQQDEEMLELPAPAEVAAKNQSLEGDTTKGTSEMSEKRGPTSSNPRKRHREDSDVEMVEDDSRKEMTAACTPRRRIINLTSVLSLQEEINEQGHEVLREMLHNHSFVGCVNPQWALAQHQTKLYLLNTTKLSEELFYQILIYDFANFGVLRLSEPAPLFDLAMLALDSPESGWTEEDGPKEGLAEYIVEFLKKKAEMLADYFSLEIDEEGNLIGLPLLIDNYVPPLEGLPIFILRLATEVNWDEEKECFESLSKECAMFYSIRKQYISEESTLSGQQSEVPGSIPNSWKWTVEHIVYKALRSHILPPKHFTEDGNILQLANLPDLYKVFERC

SEQ ID NO: 305 - protein, 756 aa, Homo sapiens
MSFVAGVIRRLDETVVNRIAAGEVIQRPANAIKEMIENCLDAKSTSIQVIVKEGGLKLIQIQDNGTGIRKEDLDIVCERFMTSKLQSFEDLASISTYGFRGEALASISHVAHVTITTKTADGKCAYRASYSDGKLKAPPKPCAGNQGTQITVEDLFYNIATRRKALKNPSEEYGKILEVVGRYSVHNAGISFSVKKQGETVADVRTLPNASTVDNIRSVFGNAVSRELIEIGCEDKTLAFKMNGYISNANYSVKKCIFLLFINHRLVESTSLRKAIETVYAAYLPKNTHPFLYLSLEISPQNVDVNVHPTKHEVHFLHEESILERVQQHIESKLLGSNSSRMYFTQTLLPGLAGPSGEMVKSTTSLTSSSTSGSSDKVYAHQMVRTDSREQKLDAFLQPLSKPLSSQPQAIVTEDKTDISSGRARQQDEEMLELPAPAEVAAKNQSLEGDTTKGTSEMSEKRGPTSSNPRKRHREDSDVEMVEDDSRKEMTAACTPRRRIINLTSVLSLQEEINEQGHEVLREMLHNHSFVGCVNPQWALAQHQTKLYLLNTTKLSEELFYQILIYDFANFGVLRLSEPAPLFDLAMLALDSPESGWTEEDGPKEGLAEYIVEFLKKKAEMLADYFSLEIDEEGNLIGLPLLIDNYVPPLEGLPIFILRLATEVNWDEEKECFESLSKECAMFYSIRKQYISEESTLSGQQSEVPGSIPNSWKWTVEHIVYKALRSHILPPKHFTEDGNILQLANLPDLYKVFERC

SEQ ID NO: 306 - protein, 756 aa, Homo sapiens
MSFVAGVIRRLDETVVNRIAAGEVIQRPANAIKEMIENCLDAKSTSIQVIVKEGGLKLIQIQDNGTGIRKEDLDIVCERFTTSRLQSFEDLASISTYGFRGEALASISHVAHVTITTKTADGKCAYRASYSDGKLKAPPKPCAGNQGTQITVEDLFYNIATRRKALKNPSEEYGKILEVVGRYSVHNAGISFSVKKQGETVADVRTLPNASTVDNIRSVFGNAVSRELIEIGCEDKTLAFKMNGYISNANYSVKKCIFLLFINHRLVESTSLRKAIETVYAAYLPKNTHPFLYLSLEISPQNVDVNVHPTKHEVHFLHEESILERVQQHIESKLLGSNSSRMYFTQTLLPGLAGPSGEMVKSTTSLTSSSTSGSSDKVYAHQMVRTDSREQKLDAFLQPLSKPLSSQPQAIVTEDKTDISSGRARQQDEEMLELPAPAEVAAKNQSLEGDTTKGTSEMSEKRGPTSSNPRKRHREDSDVEMVEDDSRKEMTAACTPRRRIINLTSVLSLQEEINEQGHEVLREMLHNHSFVGCVNPQWALAQHQTKLYLLNTTKLSEELFYQILIYDFANFGVLRLSEPAPLFDLAMLALDSPESGWTEEDGPKEGLAEYIVEFLKKKAEMLADYFSLEIDEEGNLIGLPLLIDNYVPPLEGLPIFILRLATEVNWDEEKECFESLSKECAMFYSIRKQYISEESTLSGQQSEVPGSIPNSWKWTVEHIVYKALRSHILPPKHFTEDGNILQLANLPDLYKVFERC

SEQ ID NO: 307 - protein, 756 aa, Homo sapiens
MSFVAGVIRRLDETVVNRIAAGEVIQRPANAIKEMIENCLDAKSTSIQVIVKEGGLKLIQIQDNGTGIRKEDLDIVCERFTTSKSQSFEDLASISTYGFRGEALASISHVAHVTITTKTADGKCAYRASYSDGKLKAPPKPCAGNQGTQITVEDLFYNIATRRKALKNPSEEYGKILEVVGRYSVHNAGISFSVKKQGETVADVRTLPNASTVDNIRSVFGNAVSRELIEIGCEDKTLAFKMNGYISNANYSVKKCIFLLFINHRLVESTSLRKAIETVYAAYLPKNTHPFLYLSLEISPQNVDVNVHPTKHEVHFLHEESILERVQQHIESKLLGSNSSRMYFTQTLLPGLAGPSGEMVKSTTSLTSSSTSGSSDKVYAHQMVRTDSREQKLDAFLQPLSKPLSSQPQAIVTEDKTDISSGRARQQDEEMLELPAPAEVAAKNQSLEGDTTKGTSEMSEKRGPTSSNPRKRHREDSDVEMVEDDSRKEMTAACTPRRRIINLTSVLSLQEEINEQGHEVLREMLHNHSFVGCVNPQWALAQHQTKLYLLNTTKLSEELFYQILIYDFANFGVLRLSEPAPLFDLAMLALDSPESGWTEEDGPKEGLAEYIVEFLKKKAEMLADYFSLEIDEEGNLIGLPLLIDNYVPPLEGLPIFILRLATEVNWDEEKECFESLSKECAMFYSIRKQYISEESTLSGQQSEVPGSIPNSWKWTVEHIVYKALRSHILPPKHFTEDGNILQLANLPDLYKVFERC

SEQ ID NO: 308 - protein, 756 aa, Homo sapiens
MSFVAGVIRRLDETVVNRIAAGEVIQRPANAIKEMIENCLDAKSTSIQVIVKEGGLKLIQIQDNGTGIRKEDLDIVCERFTTSKLQSFEDLASISTYGFRGEPLASISHVAHVTITTKTADGKCAYRASYSDGKLKAPPKPCAGNQGTQITVEDLFYNIATRRKALKNPSEEYGKILEVVGRYSVHNAGISFSVKKQGETVADVRTLPNASTVDNIRSVFGNAVSRELIEIGCEDKTLAFKMNGYISNANYSVKKCIFLLFINHRLVESTSLRKAIETVYAAYLPKNTHPFLYLSLEISPQNVDVNVHPTKHEVHFLHEESILERVQQHIESKLLGSNSSRMYFTQTLLPGLAGPSGEMVKSTTSLTSSSTSGSSDKVYAHQMVRTDSREQKLDAFLQPLSKPLSSQPQAIVTEDKTDISSGRARQQDEEMLELPAPAEVAAKNQSLEGDTTKGTSEMSEKRGPTSSNPRKRHREDSDVEMVEDDSRKEMTAACTPRRRIINLTSVLSLQEEINEQGHEVLREMLHNHSFVGCVNPQWALAQHQTKLYLLNTTKLSEELFYQILIYDFANFGVLRLSEPAPLFDLAMLALDSPESGWTEEDGPKEGLAEYIVEFLKKKAEMLADYFSLEIDEEGNLIGLPLLIDNYVPPLEGLPIFILRLATEVNWDEEKECFESLSKECAMFYSIRKQYISEESTLSGQQSEVPGSIPNSWKWTVEHIVYKALRSHILPPKHFTEDGNILQLANLPDLYKVFERC

SEQ ID NO: 309 - protein, 756 aa, Homo sapiens
MSFVAGVIRRLDETVVNRIAAGEVIQRPANAIKEMIENCLDAKSTSIQVIVKEGGLKLIQIQDNGTGIRKEDLDIVCERFTTSKLQSFEDLASISTYGFRGEALASISHVAHVTISTKTADGKCAYRASYSDGKLKAPPKPCAGNQGTQITVEDLFYNIATRRKALKNPSEEYGKILEVVGRYSVHNAGISFSVKKQGETVADVRTLPNASTVDNIRSVFGNAVSRELIEIGCEDKTLAFKMNGYISNANYSVKKCIFLLFINHRLVESTSLRKAIETVYAAYLPKNTHPFLYLSLEISPQNVDVNVHPTKHEVHFLHEESILERVQQHIESKLLGSNSSRMYFTQTLLPGLAGPSGEMVKSTTSLTSSSTSGSSDKVYAHQMVRTDSREQKLDAFLQPLSKPLSSQPQAIVTEDKTDISSGRARQQDEEMLELPAPAEVAAKNQSLEGDTTKGTSEMSEKRGPTSSNPRKRHREDSDVEMVEDDSRKEMTAACTPRRRIINLTSVLSLQEEINEQGHEVLREMLHNHSFVGCVNPQWALAQHQTKLYLLNTTKLSEELFYQILIYDFANFGVLRLSEPAPLFDLAMLALDSPESGWTEEDGPKEGLAEYIVEFLKKKAEMLADYFSLEIDEEGNLIGLPLLIDNYVPPLEGLPIFILRLATEVNWDEEKECFESLSKECAMFYSIRKQYISEESTLSGQQSEVPGSIPNSWKWTVEHIVYKALRSHILPPKHFTEDGNILQLANLPDLYKVFERC

SEQ ID NO: 310 - protein, 756 aa, Homo sapiens
MSFVAGVIRRLDETVVNRIAAGEVIQRPANAIKEMIENCLDAKSTSIQVIVKEGGLKLIQIQDNGTGIRKEDLDIVCERFTTSKLQSFEDLASISTYGFRGEALASISHVAHVTITTITADGKCAYRASYSDGKLKAPPKPCAGNQGTQITVEDLFYNIATRRKALKNPSEEYGKILEVVGRYSVHNAGISFSVKKQGETVADVRTLPNASTVDNIRSVFGNAVSRELIEIGCEDKTLAFKMNGYISNANYSVKKCIFLLFINHRLVESTSLRKAIETVYAAYLPKNTHPFLYLSLEISPQNVDVNVHPTKHEVHFLHEESILERVQQHIESKLLGSNSSRMYFTQTLLPGLAGPSGEMVKSTTSLTSSSTSGSSDKVYAHQMVRTDSREQKLDAFLQPLSKPLSSQPQAIVTEDKTDISSGRARQQDEEMLELPAPAEVAAKNQSLEGDTTKGTSEMSEKRGPTSSNPRKRHREDSDVEMVEDDSRKEMTAACTPRRRIINLTSVLSLQEEINEQGHEVLREMLHNHSFVGCVNPQWALAQHQTKLYLLNTTKLSEELFYQILIYDFANFGVLRLSEPAPLFDLAMLALDSPESGWTEEDGPKEGLAEYIVEFLKKKAEMLADYFSLEIDEEGNLIGLPLLIDNYVPPLEGLPIFILRLATEVNWDEEKECFESLSKECAMFYSIRKQYISEESTLSGQQSEVPGSIPNSWKWTVEHIVYKALRSHILPPKHFTEDGNILQLANLPDLYKVFERC

SEQ ID NO: 311 - protein, 756 aa, Homo sapiens
MSFVAGVIRRLDETVVNRIAAGEVIQRPANAIKEMIENCLDAKSTSIQVIVKEGGLKLIQIQDNGTGIRKEDLDIVCERFTTSKLQSFEDLASISTYGFRGEALASISHVAHVTITTKTADGKCAYRASYSDEKLKAPPKPCAGNQGTQITVEDLFYNIATRRKALKNPSEEYGKILEVVGRYSVHNAGISFSVKKQGETVADVRTLPNASTVDNIRSVFGNAVSRELIEIGCEDKTLAFKMNGYISNANYSVKKCIFLLFINHRLVESTSLRKAIETVYAAYLPKNTHPFLYLSLEISPQNVDVNVHPTKHEVHFLHEESILERVQQHIESKLLGSNSSRMYFTQTLLPGLAGPSGEMVKSTTSLTSSSTSGSSDKVYAHQMVRTDSREQKLDAFLQPLSKPLSSQPQAIVTEDKTDISSGRARQQDEEMLELPAPAEVAAKNQSLEGDTTKGTSEMSEKRGPTSSNPRKRHREDSDVEMVEDDSRKEMTAACTPRRRIINLTSVLSLQEEINEQGHEVLREMLHNHSFVGCVNPQWALAQHQTKLYLLNTTKLSEELFYQILIYDFANFGVLRLSEPAPLFDLAMLALDSPESGWTEEDGPKEGLAEYIVEFLKKKAEMLADYFSLEIDEEGNLIGLPLLIDNYVPPLEGLPIFILRLATEVNWDEEKECFESLSKECAMFYSIRKQYISEESTLSGQQSEVPGSIPNSWKWTVEHIVYKALRSHILPPKHFTEDGNILQLANLPDLYKVFERC

SEQ ID NO: 312 - protein, 756 aa, Homo sapiens
MSFVAGVIRRLDETVVNRIAAGEVIQRPANAIKEMIENCLDAKSTSIQVIVKEGGLKLIQIQDNGTGIRKEDLDIVCERFTTSKLQSFEDLASISTYGFRGEALASISHVAHVTITTKTADGKCAYRASYSDGKLKAPHKPCAGNQGTQITVEDLFYNIATRRKALKNPSEEYGKILEVVGRYSVHNAGISFSVKKQGETVADVRTLPNASTVDNIRSVFGNAVSRELIEIGCEDKTLAFKMNGYISNANYSVKKCIFLLFINHRLVESTSLRKAIETVYAAYLPKNTHPFLYLSLEISPQNVDVNVHPTKHEVHFLHEESILERVQQHIESKLLGSNSSRMYFTQTLLPGLAGPSGEMVKSTTSLTSSSTSGSSDKVYAHQMVRTDSREQKLDAFLQPLSKPLSSQPQAIVTEDKTDISSGRARQQDEEMLELPAPAEVAAKNQSLEGDTTKGTSEMSEKRGPTSSNPRKRHREDSDVEMVEDDSRKEMTAACTPRRRIINLTSVLSLQEEINEQGHEVLREMLHNHSFVGCVNPQWALAQHQTKLYLLNTTKLSEELFYQILIYDFANFGVLRLSEPAPLFDLAMLALDSPESGWTEEDGPKEGLAEYIVEFLKKKAEMLADYFSLEIDEEGNLIGLPLLIDNYVPPLEGLPIFILRLATEVNWDEEKECFESLSKECAMFYSIRKQYISEESTLSGQQSEVPGSIPNSWKWTVEHIVYKALRSHILPPKHFTEDGNILQLANLPDLYKVFERC

SEQ ID NO: 313 - protein, 756 aa, Homo sapiens
MSFVAGVIRRLDETVVNRIAAGEVIQRPANAIKEMIENCLDAKSTSIQVIVKEGGLKLIQIQDNGTGIRKEDLDIVCERFTTSKLQSFEDLASISTYGFRGEALASISHVAHVTITTKTADGKCAYRASYSDGKLKAPPKPCVGNQGTQITVEDLFYNIATRRKALKNPSEEYGKILEVVGRYSVHNAGISFSVKKQGETVADVRTLPNASTVDNIRSVFGNAVSRELIEIGCEDKTLAFKMNGYISNANYSVKKCIFLLFINHRLVESTSLRKAIETVYAAYLPKNTHPFLYLSLEISPQNVDVNVHPTKHEVHFLHEESILERVQQHIESKLLGSNSSRMYFTQTLLPGLAGPSGEMVKSTTSLTSSSTSGSSDKVYAHQMVRTDSREQKLDAFLQPLSKPLSSQPQAIVTEDKTDISSGRARQQDEEMLELPAPAEVAAKNQSLEGDTTKGTSEMSEKRGPTSSNPRKRHREDSDVEMVEDDSRKEMTAACTPRRRIINLTSVLSLQEEINEQGHEVLREMLHNHSFVGCVNPQWALAQHQTKLYLLNTTKLSEELFYQILIYDFANFGVLRLSEPAPLFDLAMLALDSPESGWTEEDGPKEGLAEYIVEFLKKKAEMLADYFSLEIDEEGNLIGLPLLIDNYVPPLEGLPIFILRLATEVNWDEEKECFESLSKECAMFYSIRKQYISEESTLSGQQSEVPGSIPNSWKWTVEHIVYKALRSHILPPKHFTEDGNILQLANLPDLYKVFERC

SEQ ID NO: 314 - protein, 756 aa, Homo sapiens
MSFVAGVIRRLDETVVNRIAAGEVIQRPANAIKEMIENCLDAKSTSIQVIVKEGGLKLIQIQDNGTGIRKEDLDIVCERFTTSKLQSFEDLASISTYGFRGEALASISHVAHVTITTKTADGKCAYRASYSDGKLKAPPKPCAGNQSTQITVEDLFYNIATRRKALKNPSEEYGKILEVVGRYSVHNAGISFSVKKQGETVADVRTLPNASTVDNIRSVFGNAVSRELIEIGCEDKTLAFKMNGYISNANYSVKKCIFLLFINHRLVESTSLRKAIETVYAAYLPKNTHPFLYLSLEISPQNVDVNVHPTKHEVHFLHEESILERVQQHIESKLLGSNSSRMYFTQTLLPGLAGPSGEMVKSTTSLTSSSTSGSSDKVYAHQMVRTDSREQKLDAFLQPLSKPLSSQPQAIVTEDKTDISSGRARQQDEEMLELPAPAEVAAKNQSLEGDTTKGTSEMSEKRGPTSSNPRKRHREDSDVEMVEDDSRKEMTAACTPRRRIINLTSVLSLQEEINEQGHEVLREMLHNHSFVGCVNPQWALAQHQTKLYLLNTTKLSEELFYQILIYDFANFGVLRLSEPAPLFDLAMLALDSPESGWTEEDGPKEGLAEYIVEFLKKKAEMLADYFSLEIDEEGNLIGLPLLIDNYVPPLEGLPIFILRLATEVNWDEEKECFESLSKECAMFYSIRKQYISEESTLSGQQSEVPGSIPNSWKWTVEHIVYKALRSHILPPKHFTEDGNILQLANLPDLYKVFERC

SEQ ID NO: 315 - protein, 756 aa, Homo sapiens
MSFVAGVIRRLDETVVNRIAAGEVIQRPANAIKEMIENCLDAKSTSIQVIVKEGGLKLIQIQDNGTGIRKEDLDIVCERFTTSKLQSFEDLASISTYGFRGEALASISHVAHVTITTKTADGKCAYRASYSDGKLKAPPKPCAGNQGTQITVEDLFYNIATRRKALKNPSEEYGKILEVVGRYSVHNAGISFSVKKQGETVADVRTLPNASTVDNIRSIFGNAVSRELIEIGCEDKTLAFKMNGYISNANYSVKKCIFLLFINHRLVESTSLRKAIETVYAAYLPKNTHPFLYLSLEISPQNVDVNVHPTKHEVHFLHEESILERVQQHIESKLLGSNSSRMYFTQTLLPGLAGPSGEMVKSTTSLTSSSTSGSSDKVYAHQMVRTDSREQKLDAFLQPLSKPLSSQPQAIVTEDKTDISSGRARQQDEEMLELPAPAEVAAKNQSLEGDTTKGTSEMSEKRGPTSSNPRKRHREDSDVEMVEDDSRKEMTAACTPRRRIINLTSVLSLQEEINEQGHEVLREMLHNHSFVGCVNPQWALAQHQTKLYLLNTTKLSEELFYQILIYDFANFGVLRLSEPAPLFDLAMLALDSPESGWTEEDGPKEGLAEYIVEFLKKKAEMLADYFSLEIDEEGNLIGLPLLIDNYVPPLEGLPIFILRLATEVNWDEEKECFESLSKECAMFYSIRKQYISEESTLSGQQSEVPGSIPNSWKWTVEHIVYKALRSHILPPKHFTEDGNILQLANLPDLYKVFERC
